(19) United States
(12) Patent Application Publication
(10) Pub. No.: US 2024/0012004 A1
(43) Pub. Date: Jan. 11, 2024

(54) INCREASED VOLTAGE-GATED SODIUM CHANNEL ALPHA PROTEIN SUBUNIT EXPRESSION THROUGH VIRAL 2A-MEDIATED CO-EXPRESSION OF NAV BETA SUBUNITS

(71) Applicant: Merck Sharp & Dohme LLC, Rahway, NJ (US)

(72) Inventors: Richard L. Kraus, Chalfont, PA (US); John Majercak, Wayne, PA (US)

(73) Assignee: Merck Sharp & Dohme LLC, Rahway, NJ (US)

(21) Appl. No.: 18/252,267

(22) PCT Filed: Nov. 12, 2021
(86) PCT No.: PCT/US2021/059044

§ 371 Date: May 9, 2023

Related U.S. Application Data
(60) Provisional application No. 63/114,861, filed on Nov. 17, 2020.

(51) Int. Cl. G01N 33/68; G01N 33/50; C07K 14/705

(52) U.S. Cl. CPC G01N 33/6872; G01N 33/502; C07K 14/705; C07K 2319/50

(57) ABSTRACT

A voltage-gated sodium channel expression system is described. The system comprises providing a polycistronic RNA message that encodes a polyprotein comprising a voltage-gated sodium channel alpha protein (Navα) subunit and one or more voltage-gated sodium channel beta protein (Navβ) subunits, each of said subunits being separated by a 2A self-cleaving peptide. During translation, the polyprotein is cleaved into individual subunit proteins which can assemble into a voltage-gated sodium channel. Host cells and lipoparticles comprising the sodium channel expression system are also provided.

### BACKGROUND OF THE INVENTION

### Field of the Invention

[0001] The present invention relates to a voltage-gated sodium channel expression system comprising a polycistronic RNA message that encodes a polyprotein that comprises a voltage-gated sodium channel alpha protein (Navα) subunit and one or more voltage-gated sodium channel accessory protein (Navβ) subunits, wherein each subunit is separated from adjacent subunits by a 2A self-cleaving peptide. During translation of the polycistronic RNA message in a host cell, the polyprotein is cleaved into individual subunit proteins, which may then assemble into a voltage-gated sodium channel integrated into a membrane of the host cell. Host cells and lipoparticles comprising the voltage-gated sodium channel expression system are also provided.

### Description of Related Art

[0002] Sodium channels are integral membrane proteins that form ion channels, conducting sodium ions (Na+) through a cell's plasma membrane. They belong to the superfamily of cation channels and can be classified according to the trigger that opens the channel for such ions, i.e., either a voltage-change (“voltage-gated”, “voltage-sensitive”, or “voltage-dependent” sodium channel; also called “VGSCs” or “Nav channel”) or a binding of a substance (a ligand) to the channel (ligand-gated sodium channels). Sodium channels comprise a large a protein (Navα) subunit that associates with accessory proteins, such as β protein (Navβ) subunits. Navα subunits form the core of the channel which is functional on its own, thus when the Navα subunit is expressed by a cell, it is able to form channels that conduct Na⁺ in a voltage-gated manner, even when Navβ subunits or other known modulating proteins are absent. However, when accessory proteins such as Navβ subunits assemble with Navα subunits, the resulting complex can display altered voltage dependence and cellular localization.

[0003] Navα subunits have four repeat domains, DI through DIV, each containing six membrane-spanning segments, labelled S1 through S6 (See FIG. 1 and FIG. 2). The highly conserved S4 segment acts as the channel's voltage sensor. The voltage sensitivity is due to positive amino acids located at every third position. When stimulated by a change in transmembrane voltage, this segment moves toward the extracellular side of the cell membrane, thereby allowing the channel to become permeable to ions. The ions are conducted through a pore comprising a more extracellular portion of the pore that is formed by the “P-loops” (the region between S5 and S6) of the four domains. This region is the narrowest part of the pore and is responsible for its ion selectivity. The more cytoplasmic portion of the pore is formed by the combined S5 and S6 segments of the four domains. The region linking domains III and IV is also important for channel function. This region plugs the channel after prolonged activation thereby inactivating it.

[0004] There are nine known Navα subunits of the super family, which are named Nav1.1α, Nav1.2α, Nav1.3α, Nav1.4α, Nav1.5α, Nav1.6α, Nav1.7α, Nav1.8α, and Nav1.9α (genes SCN1A, SCN2A, SCN3A, SCN4A, SCN5A, SCN8A, SCN9A, SCN10A, and SCN11A, respectively) distinguished not only by differences in their amino acid sequence but also by their kinetics and expression profiles. These Navα subunits have greater than 50% amino acid sequence between them in the transmembrane portions and extracellular loop regions.

[0005] Sodium channel Navβ subunits are type 1 transmembrane glycoproteins with an extracellular N-terminus and a cytoplasmic C-terminus. As members of the Ig superfamily, Navβ subunits contain a prototypic V-set Ig loop in their extracellular domain. They are homologous to neural cell adhesion molecules (CAMs) and the large family of L1 CAMs. There are four distinct Navβ subunits named in order of discovery: gene SCN1B encoding Navβ1, gene SCN2B encoding Navβ2, gene SCN3B encoding Navβ3, and gene SCN4B encoding Navβ4. Navβ1 and Navβ3 subunits interact with Navα subunits non-covalently, whereas Navβ2 and Navβ4 subunits associate with Navα subunits via disulfide bond. Sodium channels are more likely to stay open at the subthreshold membrane potential when interacting with β toxins, which in turn induces an immediate sensation of pain.

[0006] In addition to regulating channel gating, Navβ subunits also modulate channel expression and form links to the intracellular cytoskeleton via ankyrin and spectrin.

[0007] Protein reagents and cell lines that express Navα subunits for screening drug-like molecules exist; however, in general these reagents are limited in total and/or cell surface and/or functional expression. Currently, expression of Navα subunits have proven to be limiting due to several likely factors such as large size (−225 kDa), interaction with known auxiliary proteins such as Navβ subunits, extensive post-translational modification, and regulated cell surface expression. It is desirable if reagents could be engineered to improve expression of the Navα and Navβ subunits simultaneously in a host cell, which can then form a functional voltage-gated sodium channels in the host cells or in lipoparticles, such host cells may serve as an advantageous tool for discovery research.

### BRIEF SUMMARY OF THE INVENTION

[0008] The present invention provides a voltage-gated sodium channel expression system that comprises a polynucleotide encoding a polycistronic RNA message comprising an open reading frame (ORF) encoding a polyprotein comprising a voltage-gated sodium channel a protein (Navα) subunit and one or more voltage-gated sodium channel β protein (Navβ) subunits wherein the polycistronic RNA message further encodes a cleavage peptide located between adjacent subunits, which upon cleavage, produces a Navα subunit and one or more of the Navβ subunits, which are capable of assembling into a voltage-gated sodium channel. In specific embodiment, the subunits are in tandem. As used herein the Navα subunit may be selected from the group consisting of Nav1.1α, Nav1.2α, Nav1.3α, Nav1.4α, Nav1.5α, Nav1.6α, Nav1.7α, Nav1.8α, and Nav1.9α subunits and the Navβ subunits may be selected from the group consisting of Navβ1, Navβ2, Navβ3, and Navβ4 subunits with the proviso that the polyprotein does not encode more than one copy of any particular Navβ subunit. Upon translation of the polycistronic RNA message, a polyprotein is produced, which upon cleavage of the cleavage peptide, produces individual Navα and Navβ subunits, which can assemble into a voltage-gated sodium channel. In particular embodiments, the cleavage peptide is a viral 2A self-cleaving peptide including, but not limited to, the viral P2A peptide from porcine teschovirus-1 2A, the viral T2A peptide from thosea asigna virus 2A, the viral E2A peptide from equine rhinitis A virus, or the viral F2A peptide from foot-and-mouth disease virus 18.

[0009] In a particular embodiment of the present invention, the polycistronic message may encode a polyprotein comprising a Navα subunit and one or more Navβ subunits having a structure according to:
[0010] (i) Nav1.1α-2A-Navβ1; Nav1.1α-2A-Navβ2; Nav1.1α-2A-Navβ3; Nav1.1α-2A-Navβ4; Nav1.1α-2A-Navβ1-2A-Navβ2; Nav1.1α-2A-Navβ1-2A-Navβ3; Nav1.1α-2A-Navβ1-2A-Navβ4; Nav1.1α-2A-Navβ2-2A-Navβ3; Nav1.1α-2A-Navβ1-2A-Navβ4; Nav1.1α-2A-Navβ3-2A-Navβ4; or, Nav1.1α-2A-Navβ1-2A-Navβ2-2A-β3; Nav1.1α-2A-Navβ1-2A-Navβ2-2A-β4; or, Nav1.1α-2A-Navβ1-2A-Navβ2-2A-β3-2A-Navβ2-2A-β4;
[0011] (ii) Nav1.2α-2A-Navβ1; Nav1.2α-2A-Navβ2; Nav1.2α-2A-Navβ3; Nav1.2α-2A-Navβ4; Nav1.2α-2A-Navβ1-2A-Navβ2; Nav1.2α-2A-Navβ1-2A-Navβ3; Nav1.2α-2A-Navβ1-2A-Navβ4; Nav1.2α-2A-Navβ2-2A-Navβ3; Nav1.2α-2A-Navβ1-2A-Navβ4; Nav1.2α-2A-Navβ3-2A-Navβ4; or, Nav1.2α-2A-Navβ1-2A-Navβ2-2A-β3; Nav1.2α-2A-Navβ1-2A-Navβ2-2A-β4; or, Nav1.2α-2A-Navβ1-2A-Navβ2-2A-β3-2A-Navβ2-2A-β4;
[0012] (iii) Nav1.3α-2A-Navβ1; Nav1.3α-2A-Navβ2; Nav1.3α-2A-Navβ3; Nav1.3α-2A-Navβ4; Nav1.3α-2A-Navβ1-2A-Navβ2; Nav1.3α-2A-Navβ1-2A-Navβ3; Nav1.3α-2A-Navβ1-2A-Navβ4; Nav1.3α-2A-Navβ2-2A-Navβ3; Nav1.3α-2A-Navβ1-2A-Navβ4; Nav1.3α-2A-Navβ3-2A-Navβ4; or, Nav1.3α-2A-Navβ1-2A-Navβ2-2A-β3; Nav1.3α-2A-Navβ1-2A-Navβ2-2A-β4; or, Nav1.3α-2A-Navβ1-2A-Navβ2-2A-β3-2A-Navβ2-2A-β4;
[0013] (iv) Nav1.4α-2A-Navβ1; Nav1.4α-2A-Navβ2; Nav1.4α-2A-Navβ3; Nav1.4α-2A-Navβ4; Nav1.4α-2A-Navβ1-2A-Navβ2; Nav1.4α-2A-Navβ1-2A-Navβ3; Nav1.4α-2A-Navβ1-2A-Navβ4; Nav1.4α-2A-Navβ2-2A-Navβ3; Nav1.4α-2A-Navβ1-2A-Navβ4; Nav1.4α-2A-Navβ3-2A-Navβ4; or, Nav1.4α-2A-Navβ1-2A-Navβ2-2A-β3; Nav1.4α-2A-Navβ1-2A-Navβ2-2A-β4; or, Nav1.4α-2A-Navβ1-2A-Navβ2-2A-β3-2A-Navβ2-2A-β4;
[0014] (v) Nav1.5α-2A-Navβ1; Nav1.5α-2A-Navβ2; Nav1.5α-2A-Navβ3; Nav1.5α-2A-Navβ4; Nav1.5α-2A-Navβ1-2A-Navβ2; Nav1.5α-2A-Navβ1-2A-Navβ3; Nav1.5α-2A-Navβ1-2A-Navβ4; Nav1.5α-2A-Navβ2-2A-Navβ3; Nav1.5α-2A-Navβ1-2A-Navβ4; Nav1.5α-2A-Navβ3-2A-Navβ4; or, Nav1.5α-2A-Navβ1-2A-Navβ2-2A-β3; Nav1.5α-2A-Navβ1-2A-Navβ2-2A-β4; or, Nav1.5α-2A-Navβ1-2A-Navβ2-2A-β3-2A-Navβ2-2A-β4;
[0015] (vi) Nav1.6α-2A-Navβ1, Nav1.6α-2A-Navβ2; Nav1.6α-2A-Navβ3; Nav1.6α-2A-Navβ4; Nav1.6α-2A-Navβ1-2A-Navβ2; Nav1.6α-2A-Navβ1-2A-Navβ3; Nav1.6α-2A-Navβ1-2A-Navβ4; Nav1.6α-2A-Navβ2-2A-Navβ3; Nav1.6α-2A-Navβ1-2A-Navβ4; Nav1.6α-2A-Navβ3-2A-Navβ4; or, Nav1.6α-2A-Navβ1-2A-Navβ2-2A-β3; Nav1.6α-2A-Navβ1-2A-Navβ2-2A-β4; or, Nav1.6α-2A-Navβ1-2A-Navβ2-2A-β3-2A-Navβ2-2A-β4;
[0016] (vii) Nav1.7α-2A-Navβ1; Nav1.7α-2A-Navβ2; Nav1.7α-2A-Navβ3; Nav1.7α-2A-Navβ4; Nav1.7α-2A-Navβ1-2A-Navβ2; Nav1.7α-2A-Navβ1-2A-Navβ3; Nav1.7α-2A-Navβ1-2A-Navβ4; Nav1.7α-2A-Navβ2-2A-Navβ3; Nav1.7α-2A-Navβ1-2A-Navβ4; Nav1.7α-2A-Navβ3-2A-Navβ4; or, Nav1.7α-2A-Navβ1-2A-Navβ2-2A-β3; Nav1.7α-2A-Navβ1-2A-Navβ2-2A-β4; or, Nav1.7α-2A-Navβ1-2A-Navβ2-2A-β3-2A-Navβ2-2A-β4;
[0017] (viii) Nav1.8α-2A-Navβ1; Nav1.8α-2A-Navβ2; Nav1.8α-2A-Navβ3; Nav1.8α-2A-Navβ4; Nav1.8α-2A-Navβ1-2A-Navβ2; Nav1.8α-2A-Navβ1-2A-Navβ3; Nav1.8α-2A-Navβ1-2A-Navβ4; Nav1.8α-2A-Navβ2-2A-Navβ3; Nav1.8α-2A-Navβ1-2A-Navβ4; Nav1.8α-2A-Navβ3-2A-Navβ4; or, Nav1.8α-2A-Navβ1-2A-Navβ2-2A-β3; Nav1.8α-2A-Navβ1-2A-Navβ2-2A-β4; or, Nav1.8α-2A-Navβ1-2A-Navβ2-2A-β3-2A-Navβ2-2A-β4; or
[0018] (ix) Nav1.9α-2A-Navβ1; Nav1.9α-2A-Navβ2; Nav1.9α-2A-Navβ3; Nav1.9α-2A-Navβ4; Nav1.9α-2A-Navβ1-2A-Navβ2; Nav1.9α-2A-Navβ1-2A-Navβ3; Nav1.9α-2A-Navβ1-2A-Navβ4; Nav1.9α-2A-Navβ2-2A-Navβ3; Nav1.9α-2A-Navβ1-2A-Navβ4; Nav1.9α-2A-Navβ3-2A-Navβ4; or, Nav1.9α-2A-Navβ1-2A-Navβ2-2A-β3; Nav1.9α-2A-Navβ1-2A-Navβ2-2A-β4; or, Nav1.9α-2A-Navβ1-2A-Navβ2-2A-β3-2A-Navβ2-2A-β4;
   wherein 2A is a viral peptide selected from the group consisting of P2A, T2A, E2A, F2A.

[0019] In a particular embodiments of the present invention, the polycistronic message may encode a polyprotein comprising a Navα subunit and one or more Navβ subunits having a structure according to:
[0020] (i) Nav1.1α-PP2A-Navβ1; Nav1.1α-P2A-Navβ2; Nav1.1α-P2A-Navβ3; Nav1.1α-P2A-Navβ4; Nav1.1α-P2A-Navβ1-P2A-Navβ2; Nav1.1α-P2A-Navβ1-P2A-Navβ3; Nav1.1α-P2A-Navβ1-P2A-Navβ4; Nav1.1α-P2A-Navβ2-P2A-Navβ3; Nav1.1α-P2A-Navβ1-P2A-Navβ4; Nav1.1α-P2A-Navβ3-P2A-Navβ4; or, Nav1.1α-P2A-Navβ1-P2A-Navβ2-P2A-β3; Nav1.1α-P2A-Navβ1-P2A-Navβ2-P2A-β4; or, Nav1.1α-P2A-Navβ1-P2A-Navβ2-P2A-β3-P2A-Navβ2-P2A-β4;
[0021] (ii) Nav1.2α-P2A-Navβ1; Nav1.2α-P2A-Navβ2; Nav1.2α-P2A-Navβ3; Nav1.2α-P2A-Navβ4; Nav1.2α-P2A-Navβ1-P2A-Navβ2; Nav1.2α-P2A-Navβ1-P2A-Navβ3; Nav1.2α-P2A-Navβ1-P2A-Navβ4; Nav1.2α-P2A-Navβ2-P2A-Navβ3; Nav1.2α-P2A-Navβ1-P2A-Navβ4; Nav1.2α-P2A-Navβ3-P2A-Navβ4; or, Nav1.2α-P2A-Navβ1-P2A-Navβ2-P2A-β3; Nav1.2α-P2A-Navβ1-P2A-Navβ2-P2A-β4; or, Nav1.2α-P2A-Navβ1-P2A-Navβ2-P2A-β3-P2A-Navβ2-P2A-β4;
[0022] (iii) Nav1.3α-P2A-Navβ1; Nav1.3α-P2A-Navβ2; Nav1.3α-P2A-Navβ3; Nav1.3α-P2A-Navβ4; Nav1.3α-P2A-Navβ1-P2A-Navβ2; Nav1.3α-P2A-Navβ1-P2A-Navβ3; Nav1.3α-P2A-Navβ1-P2A-Navβ4; Nav1.3α-P2A-Navβ2-P2A-Navβ3; Nav1.3α-P2A-Navβ1-P2A-Navβ4; Nav1.3α-P2A-Navβ3-P2A-Navβ4; or, Nav1.3α-P2A-Navβ1-P2A-Navβ2-P2A-β3; Nav1.3α-P2A-Navβ1-P2A-Navβ2-P2A-β4; or, Nav1.3α-P2A-Navβ1-P2A-Navβ2-P2A-β3-P2A-Navβ2-P2A-β4;
[0023] (iv) Nav1.4α-P2A-Navβ1; Nav1.4α-P2A-Navβ2; Nav1.4α-P2A-Navβ3; Nav1.4α-P2A-Navβ4; Nav1.4α-P2A-Navβ1-P2A-Navβ2; Nav1.4α-P2A-Navβ1-P2A-Navβ3; Nav1.4α-P2A-Navβ1-P2A-Navβ4; Nav1.4α-P2A-Navβ2-P2A-Navβ3; Nav1.4α-P2A-Navβ1-P2A-Navβ4; Nav1.4α-P2A-Navβ3-P2A-Navβ4; or, Nav1.4α-P2A-Navβ1-P2A-Navβ2-P2A-β3; Nav1.4α-P2A-Navβ1-P2A-Navβ2-P2A-β4; or, Nav1.4α-P2A-Navβ1-P2A-Navβ2-P2A-β3-P2A-Navβ2-P2A-β4;
[0024] (v) Nav1.5α-P2A-Navβ1; Nav1.5α-P2A-Navβ2; Nav1.5α-P2A-Navβ3; Nav1.5α-P2A-Navβ4; Nav1.5α-P2A-Navβ1-P2A-Navβ2; Nav1.5α-P2A-Navβ1-P2A-Navβ3; Nav1.5α-P2A-Navβ1-P2A-Navβ4; Nav1.5α-P2A-Navβ2-P2A-Navβ3; Nav1.5α-P2A-Navβ1-P2A-Navβ4; Nav1.5α-P2A-Navβ3-P2A-Navβ4; or, Nav1.5α-P2A-Navβ1-P2A-Navβ2-P2A-β3; Nav1.5α-P2A-Navβ1-P2A-Navβ2-P2A-β4; or, Nav1.5α-P2A-Navβ1-P2A-Navβ2-P2A-β3-P2A-Navβ2-P2A-β4;
[0025] (vi) Nav1.6α-P2A-Navβ1; Nav1.6α-P2A-Navβ2; Nav1.6α-P2A-Navβ3; Nav1.6α-P2A-Navβ4; Nav1.6α-P2A-Navβ1-P2A-Navβ2; Nav1.6α-P2A-Navβ1-P2A-Navβ3; Nav1.6α-P2A-Navβ1-P2A-Navβ4; Nav1.6α-P2A-Navβ2-P2A-Navβ3; Nav1.6α-P2A-Navβ1-P2A-Navβ4; Nav1.6α-P2A-Navβ3-P2A-Navβ4; or, Nav1.6α-P2A-Navβ1-P2A-Navβ2-P2A-β3; Nav1.6α-P2A-Navβ1-P2A-Navβ2-P2A-β4; or, Nav1.6α-P2A-Navβ1-P2A-Navβ2-P2A-β3-P2A-Navβ2-P2A-β4;
[0026] (vii) Nav1.7α-P2A-Navβ1; Nav1.7α-P2A-Navβ2; Nav1.7α-P2A-Navβ3; Nav1.7α-P2A-Navβ4; Nav1.7α-P2A-Navβ1-P2A-Navβ2; Nav1.7α-P2A-Navβ1-P2A-Navβ3; Nav1.7α-P2A-Navβ1-P2A-Navβ4; Nav1.7α-P2A-Navβ2-P2A-Navβ3; Nav1.7α-P2A-Navβ1-P2A-Navβ4; Nav1.7α-P2A-Navβ3-P2A-Navβ4; or, Nav1.7α-P2A-Navβ1-P2A-Navβ2-P2A-β3; Nav1.7α-P2A-Navβ1-P2A-Navβ2-P2A-β4; or, Nav1.7α-P2A-Navβ1-P2A-Navβ2-P2A-β3-P2A-Navβ2-P2A-β4;
[0027] (viii) Nav1.8α-P2A-Navβ1; Nav1.8α-P2A-Navβ2; Nav1.8α-P2A-Navβ3; Nav1.8α-P2A-Navβ4; Nav1.8α-P2A-Navβ1-P2A-Navβ2; Nav1.8α-P2A-Navβ1-P2A-Navβ3; Nav1.8α-P2A-Navβ1-P2A-Navβ4; Nav1.8α-P2A-Navβ2-P2A-Navβ3; Nav1.8α-P2A-Navβ1-P2A-Navβ4; Nav1.8α-P2A-Navβ3-P2A-Navβ4; or, Nav1.8α-P2A-Navβ1-P2A-Navβ2-P2A-β3; Nav1.8α-P2A-Navβ1-P2A-Navβ2-P2A-β4; or, Nav1.8α-P2A-Navβ1-P2A-Navβ2-P2A-β3-P2A-Navβ2-P2A-β4; or
[0028] (ix) Nav1.9α-P2A-Navβ1; Nav1.9α-P2A-Navβ2; Nav1.9α-P2A-Navβ3; Nav1.9α-P2A-Navβ4; Nav1.9α-P2A-Navβ1-P2A-Navβ2; Nav1.9α-P2A-Navβ1-P2A-Navβ3; Nav1.9α-P2A-Navβ1-P2A-Navβ4; Nav1.9α-P2A-Navβ2-P2A-Navβ3; Nav1.9α-P2A-Navβ1-P2A-Navβ4; Nav1.9α-P2A-Navβ3-P2A-Navβ4; or, Nav1.9α-P2A-Navβ1-P2A-Navβ2-P2A-β3; Nav1.9α-P2A-Navβ1-P2A-Navβ2-P2A-β4; or, Nav1.9α-P2A-Navβ1-P2A-Navβ2-P2A-β3-P2A-Navβ2-P2A-β4.

[0029] The Navα subunit comprising the present invention may be encoded by a nucleic acid molecule comprising a nucleotide sequence selected from the group of nucleotide sequences consisting of SEQ ID NOs: 7, 9, 11, 13, 15, 17, 19, 21, and 87 and or a nucleic acid molecule sequence has at least 80%, or in specific embodiments 90%, identity to a nucleotide sequence selected from the group of nucleotide sequences consisting of SEQ ID NOs: 7, 9, 11, 13, 15, 17, 19, 21, and 87.

[0030] The Navβ subunit comprising the present invention may be encoded by a nucleic acid molecule comprising a nucleotide sequence selected from the group of nucleotide sequences consisting of SEQ ID NOs: 23, 25, 27, and 89 or a nucleic acid molecule sequence has at least 80%, or in specific embodiments 90%, identity to a nucleotide sequence selected from the group of nucleotide sequences consisting of SEQ ID NOs: 23, 25, 27, and 89.

[0031] In particular embodiments, the cleavage peptide is the viral P2A peptide from porcine teschovirus-1 2A.

[0032] In an embodiment of the present invention, a polynucleotide is provided that encodes a polyprotein comprising an amino acid sequence selected from the group consisting of SEQ ID Nos: 34, 35, 36, 37, 38, 39, 40, 41, 42, 43, 44, 45, 46, 47, 48, 49, 50, 51, 52, 53, 54, 55, 56, and 57. In particular embodiments, the polyprotein has 80%, or in specific embodiments 90%, identity to a polyprotein comprising an amino acid sequence selected from the group of amino acid sequences consisting of SEQ ID Nos: 34, 35, 36, 37, 38, 39, 40, 41, 42, 43, 44, 45, 46, 47, 48, 49, 50, 51, 52, 53, 54, 55, 56, and 57. In a further embodiment of the present invention, the polyprotein is encoded by a polynucleotide in which the ORF encoding the polyprotein comprises a nucleotide sequence selected from the group consisting of SEQ ID Nos: 58, 59, 60, 61, 62, 63, 64, 65, 66, 67, 68, 69, 70, 71, 72, 73, 74, 75, 76, 77, 78, 79, 80, and 81. In a further embodiment, the polynucleotide sequence comprises an ORF that has at least 80%, or in specific embodiments 90%, identity to a nucleotide sequence selected from the group of nucleotide sequences consisting of SEQ ID NOs: 58, 59, 60, 61, 62, 63, 64, 65, 66, 67, 68, 69, 70, 71, 72, 73, 74, 75, 76, 77, 78, 79, 80, and 81. In a further embodiment of any one of the above nucleic acid molecules or polynucleotide sequences, the nucleotide sequence is codon-optimized for expression nucleic acid molecule in mammalian or human cells. In particular embodiments, the polynucleotide encoding the expression system is operably linked to a transcriptionally active promoter, which may include one or more enhancer elements, at the 5′ end and transcription termination sequences at the 3′ end. The ORF encoding the polyprotein located within the polynucleotide is operably linked at its 5′ end to RNA translation regulatory elements and to one or more stop codons at its 3′ end.

[0033] During translation of the polycistronic RNA message, the polyprotein as it is being produced is cleaved at a cleavage site within the cleavage peptide to produce a first polypeptide comprising the portion of the cleavage peptide upstream of the cleavage site within the cleavage peptide (upstream portion) at the C-terminus of the first polypeptide and a second polypeptide comprising the portion of the cleavage peptide downstream of the cleavage site (downstream portion) at the N-terminus of the second polypeptide.

[0034] Thus, the present invention provides (a) a human Nav1.1α, Nav1.2α, Nav1.3α, Nav1.4α, Nav1.5α, Nav1.6α, Nav1.7α, Nav1.8α, or Nav1.9α subunit comprising the upstream portion of the cleavage peptide at the C-terminus; a human Nav1.1α, Nav1.2α, Nav1.3α, Nav1.4α, Nav1.5α, Nav1.6α, Nav1.7α, Nav1.8α, or Nav1.9α subunit comprising the downstream portion of the cleavage peptide at the N-terminus; or a human Nav1.1α, Nav1.2α, Nav1.3α, Nav1.4α, Nav1.5α, Nav1.6α, Nav1.7α, Nav1.8α, or Nav1.9α subunit comprising the downstream portion of the cleavage peptide at its N-terminus and comprising the upstream portion of the cleavage peptide at the C-terminus; and (b) at least one human Navβ1, Navβ2, Navβ3, or Navβ4 subunit comprising the upstream portion of the cleavage peptide at the C-terminus; a human Navβ1, Navβ2, Navβ3, or Navβ4 subunit comprising the downstream portion of the cleavage peptide at the N-terminus; or a human Navβ1, Navβ2, Navβ3, or Navβ4 subunit comprising the downstream portion of the cleavage peptide at its N-terminus and comprising the upstream portion of the cleavage peptide at the C-terminus, with the proviso that with the proviso that only one Navα or Navβ subunit comprises solely the downstream portion of the cleavage site at the N-terminus and only one Navα or Navβ subunit comprises solely the upstream portion of the peptide at the C-terminus.

[0035] In embodiments in which the cleavage peptide is a viral 2A peptide comprising a glycine-proline (GP) cleavage site wherein the GP is cleaved to provide an upstream peptide ending with a C-terminal G attached to the C-terminus of the Navα or Navβ subunit and a P and downstream portion of the viral 2A peptide having zero to 40 amino acids is at the N-terminus of the Navα or Navβ subunit, thus the present invention further provides (a) a human Nav1.1α, Nav1.2α, Nav1.3α, Nav1.4α, Nav1.5α, Nav1.6α, Nav1.7α, Nav1.8α, or Nav1.9α subunit comprising the peptide amino acid sequence upstream of the GP cleavage site at the C-terminus; a human Nav1.1α, Nav1.2α, Nav1.3α, Nav1.4α, Nav1.5α, Nav1.6α, Nav1.7α, Nav1.8α, or Nav1.9α subunit comprising a P and downstream amino acid sequence of zero to 40 amino acids at the N-terminus; or a human Nav1.1α, Nav1.2α, Nav1.3α, Nav1.4α, Nav1.5α, Nav1.6α, Nav1.7α, Nav1.8α, or Nav1.9α subunit comprising a P and downstream amino acid sequence of zero to 40 amino acids at the N-terminus and comprising the amino acid sequence upstream of the GP cleavage site at the C-terminus; and, (b) at least one human Navβ1, Navβ2, Navβ3, or Navβ4 subunit comprising the amino acid sequence upstream of the GP cleavage site at the C-terminus; a human Navβ1, Navβ2, Navβ3, or Navβ4 subunit comprising a P and downstream amino acid sequence of zero to 40 amino acids at the N-terminus; or a human Navβ1, Navβ2, Navβ3, or Navβ4 subunit comprising a P and downstream sequence of zero to 40 amino acids at the N-terminus and comprising amino acid sequence upstream of the GP cleavage site at the C-terminus; wherein only one Navα or Navβ subunit comprises solely a P and a downstream peptide of zero to 40 amino acids at the N-terminus and only one Navα or Navβ subunit comprises solely an upstream peptide at its C-terminus.

[0036] In embodiments in which the cleavage peptide is a viral P2A peptide comprising a GP cleavage site, the present invention further provides (a) a human Nav1.1α, Nav1.2α, Nav1.3α, Nav1.4α, Nav1.5α, Nav1.6α, Nav1.7α, Nav1.8α, or Nav1.9α subunit comprising the amino acid sequence GSGATNFSLLKQAGDVEENPG (SEQ ID NO: 85) at the C-terminus; a human Nav1.1α, Nav1.2α, Nav1.3α, Nav1.4α, Nav1.5α, Nav1.6α, Nav1.7α, Nav1.8α, or Nav1.9α subunit comprising a P at the N-terminus; or a human Nav1.1α, Nav1.2α, Nav1.3α, Nav1.4α, Nav1.5α, Nav1.6α, Nav1.7α, Nav1.8α, or Nav1.9α subunit comprising a P at the N-terminus and comprising the amino acid sequence GSGATNFSLLKQAGDVEENPG (SEQ ID NO: 85) at the C-terminus and (b) at least one human Navβ1, Navβ2, Navβ3, or Navβ4 subunit comprising the amino acid sequence GSGATNFSLLKQAGDVEENPG (SEQ ID NO: 85) at the C-terminus; a human Navβ1, Navβ2, Navβ3, or Navβ4 subunit comprising a P at the N-terminus; or a human Navβ1, Navβ2, Navβ3, or Navβ4 subunit comprising a P at the N-terminus and comprising the amino acid sequence GSGATNFSLLKQAGDVEENPG (SEQ ID NO: 85) at the C-terminus; wherein only one Navα or Navβ subunit comprises solely a P at the N-terminus and at only one Navα or Navβ subunit comprises solely an upstream peptide at its C-terminus.

[0037] In a further embodiment, the present invention provides a voltage-gated sodium channel comprising a human Nav1.1α, Nav1.2α, Nav1.3α, Nav1.4α, Nav1.5α, Nav1.6α, Nav1.7α, Nav1.8α, or Nav1.9α subunit comprising the upstream portion of a cleavage peptide at the C-terminus and/or a downstream portion of a cleavage peptide at the N-terminus; and, one or more of a human Navβ1 subunit comprising a downstream portion of a cleavage peptide at the N-terminus and/or the upstream portion of a cleavage peptide at the C-terminus, a human Navβ2 subunit comprising a downstream portion of a cleavage peptide at the N-terminus and/or the upstream portion of a cleavage peptide at the C-terminus, and a human Navβ3 subunit comprising a downstream portion of a cleavage peptide at the N-terminus and/or the upstream portion of a cleavage peptide at the C-terminus, with the proviso that a first subunit comprises only a downstream portion of the cleavage peptide at the N-terminus and a second subunit comprises only the upstream portion of the cleavage peptide at the C-terminus, and third and/or fourth subunits, if present, comprise a downstream portion of the cleavage peptide at the N-terminus and/or the upstream portion of the cleavage peptide at the C-terminus.

[0038] In a further embodiment, the present invention provides a voltage-gated sodium channel comprising a human Nav1.1α, Nav1.2α, Nav1.3α, Nav1.4α, Nav1.5α, Nav1.6α, Nav1.7α, Nav1.8α, or Nav1.9α subunit comprising the amino acid sequence upstream of a GP cleavage site in a 2A cleavage peptide at the C-terminus and/or comprising a P at the N-terminus; and, one or more of a human Navβ1 subunit comprising a P at the N-terminus and/or the amino acid sequence upstream of the GP cleavage site at the C-terminus, a human Navβ2 subunit comprising a P at the N-terminus and/or the amino acid sequence upstream of the GP cleavage site at the C-terminus, and a human Navβ3 subunit comprising P at the N-terminus and/or the amino acid sequence upstream of the GP cleavage site at the C-terminus, with the proviso that a first subunit comprises only a P at the N-terminus and a second subunit comprises only the amino acid sequence upstream of the GP cleavage site at the C-terminus, and third and/or fourth subunits, if present, comprise a P at the N-terminus and/or the amino acid sequence upstream of the GP cleavage site at the C-terminus.

[0039] In a further embodiment, the present invention provides a voltage-gated sodium channel comprising a human Nav1.1α, Nav1.2α, Nav1.3α, Nav1.4α, Nav1.5α, Nav1.6α, Nav1.7α, Nav1.8α, or Nav1.9α subunit comprising the amino acid sequence GSGATNFSLLKQAGDVEENPG (SEQ ID NO: 85) at the C-terminus and/or a P at the N-terminus; and, one or more of a human Navβ1 comprising a P at the N-terminus and/or comprising the amino acid sequence GSGATNFSLLKQAGDVEENPG (SEQ ID NO: 85) at the C-terminus, a human Navβ2 subunit comprising a P at the N-terminus and/or comprising the amino acid sequence GSGATNFSLLKQAGDVEENPG (SEQ ID NO: 85) at the C-terminus, and a human Navβ3 subunit comprising a P at its N-terminus and/or comprising the amino acid sequence GSGATNFSLLKQAGDVEENPG (SEQ ID NO: 85) at the C-terminus, with the proviso that a first subunit comprises only a P at its the N-terminus and a second subunit comprises only the amino acid sequence GSGATNFSLLKQAGDVEENPG (SEQ ID NO: 85) at the C-terminus, and third and/or fourth subunits, if present, comprise a P at the N-terminus and the amino acid sequence GSGATNFSLLKQAGDVEENPG (SEQ ID NO: 85) at the C-terminus.

[0040] In a further embodiment of the present invention, the human Nav1.1α, Nav1.2α, Nav1.3α, Nav1.4α, Nav1.5α, Nav1.6, Nav1.7α, or Nav1.8 subunit comprise the amino acid sequence set forth in SEQ ID NO: 6, 8, 10, 12, 14, 16, 18, or 20, respectively. In particular embodiments, the human Nav1.1α, Nav1.2α, Nav1.3α, Nav1.4α, Nav1.5α, Nav1.6, Nav1.7α, or Nav1.8 subunit comprise an amino acid sequence that has at least about 80-99.9% (in specific embodiments, 80, 81, 82, 83, 84, 85, 86, 87, 88, 89, 90, 91, 92, 93, 94, 95, 96, 97, 98, 99, 99.5, or 99.9%) identity to an amino acid sequence set forth in SEQ ID NO: 6, 8, 10, 12, 14, 16, 18, and 20, respectively.

[0041] In a further embodiment of the present invention, the human Navβ1, Navβ2, or Navβ3 subunit comprise the amino acid sequence set forth in SEQ ID NO: 22, 24, and 26, respectively. In particular embodiments, the the human Navβ1, Navβ2, or Navβ3 subunit comprise an amino acid sequence that has at least about 80-99.9% (in specific embodiments, 80, 81, 82, 83, 84, 85, 86, 87, 88, 89, 90, 91, 92, 93, 94, 95, 96, 97, 98, 99, 99.5, or 99.9%) identity to an amino acid sequence set forth in SEQ ID NO: 22, 24, and 26, respectively.

[0042] The present invention also provides an isolated host cell comprising the voltage-gated sodium channel expression system. In the host cell, expression of the polynucleotide produces a polycistronic RNA message, which during translation produces a polyprotein that is cleaved at the cleavage peptides to produce the encoded Navα subunit and the one or more Navβ subunits, which are capable of assembling into a voltage-gated sodium channel in the host cell membrane. The host cells may be disrupted using common techniques such as mechanical disruption or mild detergent treatment to produce a disrupted cell lysate from which a membrane fraction thereof comprising the assembled sodium channel may be recovered.

[0043] Thus, the present invention also provides a method of expressing a voltage-gated sodium channel comprising introducing a voltage-gated sodium channel expression system disclosed herein into a host cell and culturing the host cell under conditions favorable to expression of the voltage-gated sodium channel expression system to produce Navα subunit and one or more Navβ subunits assembled into a sodium channel in the host cell plasma membrane; and, optionally, isolating plasma membrane fractions comprising the voltage-gated sodium channel by disrupting the host cell to provide an extract or lysate, and isolating the plasma membrane fraction, which includes the voltage-gated sodium channel in the plasma membrane, from the lysate.

[0044] In particular embodiments, the voltage-gated sodium channel expression system may be performed in host cells under conditions that favor production of lipoparticles comprising assembled voltage-gated sodium channels. Thus, the present invention further provides a method for making a lipoparticle comprising an assembled voltage-gated sodium channel on the surface of the lipoparticle comprising introducing a viral vector comprising a voltage-gated sodium channel expression system disclosed herein into an isolated host cell, culturing the host cell under conditions favorable to generation of lipoparticles having assembled voltage-gated sodium channels on the surface thereof, and isolating the lipoparticles from the host cells and/or host cell culture medium. Accordingly, the present invention further provides a a lipoparticle comprising an external lipid bilayers an enveloped retroviral structural protein; and a voltage-gated sodium channel wherein said enveloped retroviral structural protein is an uncleaned gag protein, wherein said gag protein does not comprise a heterologous tag that binds to the voltage-gated sodium channel, provided that the only viral proteins in the lipoparticle are structural proteins.

[0045] The present invention also provides a method for increasing expression levels of a voltage-gated Navα subunit selected from Nav1.1α, Nav1.2α, Nav1.3α, Nav1.4α, Nav1.5α, Nav1.6α, Nav1.7α, Nav1.8α, or Nav1.9α subunits in a host cell comprising co-expressing with the Navα subunit one or more voltage-gated sodium channel Navβ subunits selected from the group consisting Navβ1, Navβ2, or Navβ3 in a host cell.

[0046] The present invention also provides a method for increasing expression levels of a Navα subunit selected from the group consisting of Nav1.1α, Nav1.2α, Nav1.3α, Nav1.4α, Nav1.5α, Nav1.6α, Nav1.7α, Nav1.8α, or Nav1.9α subunits in a host cell comprising co-expressing with the Navα subunit one or more sodium channel Navβ subunits selected from the group consisting Navβ1, Navβ2, or Navβ3 in a host cell, wherein the subunits are expressed in the host cell by introducing a voltage-gated sodium channel expression system disclosed herein into the host cell.

[0047] Furthermore, the present invention also provides a method for identifying an inhibitor of voltage-gated sodium channel activity (e.g., sodium flux) comprising expressing a voltage-gated sodium channel disclosed herein in a host cell as described herein, contacting the voltage-gated sodium channel with a candidate inhibitor, and determining whether the voltage-gated sodium channel exhibits lower activity in the presence of the candidate inhibitor relative to activity in the absence of the candidate inhibitor wherein the candidate inhibitor is identified as a voltage-gated sodium channel inhibitor if said lower activity is observed. In specific embodiments, the voltage-gated sodium channel activity is sodium flux. In specific embodiments, sodium flux is measured by patch-clamp assay, competition binding assay, or FLIPR® membrane potential assay.

### BRIEF DESCRIPTION OF THE DRAWINGS

[0048] FIG. 1 shows the proposed structure of human Nav1.7α (huNavα). The drawing shows a huNav1.7α model viewed from top/extracellular (top left panel) and side through cytoplasmic membrane (top right panel) wherein the extracellular space is above the sideview of the cytoplasmic membrane and the intracellular space is below the side view of the cytoplasmic membrane. Nav1.7α structural topology viewed from extracellular side (bottom panel) shown with Navβ1, Navβ2, and Navβ3 subunits.

[0049] FIG. 2 shows a schematic diagram of human Nav1.7α. VSD=voltage sensing domain; PM=pore module; D=domain; S=transmembrane segment.

### DETAILED DESCRIPTION OF THE INVENTION

### Definitions

[0050] As used herein, the term “nucleotides” refer to organic molecules comprising a nucleoside and one to three phosphate diesters. Nucleotides serve as monomeric units of the nucleic acid polymers deoxyribonucleic acid (DNA) and ribonucleic acid (RNA). The nucleoside comprising a nucleotide is a nucleobase linked to a deoxyribose to provide a nucleotide that is deoxynucleotide for DNA or a ribose to provide a nucleotide for RNA. The four nucleobases comprising a nucleotide are guanine (G), cytosine (C), adenine (A), and thymine (T)

[0051] As used herein, a “polynucleotide” or “nucleic acid” is deoxynucleic acid (DNA) polymer comprising deoxyribonucleotides or a ribonucleic acid (RNA) polymer comprising ribonucleotides. The nucleotides comprising DNA or RNA are typically selected from guanine (G), cytosine (C), adenine (A), and thymine (T), and analogs thereof.

[0052] As used herein, a “nucleotide sequence” is a succession of nucleotides signified by a series of a set of five different letters that indicate the order of nucleotides forming alleles within a DNA (using GACT) or RNA (GACU) molecule. By convention, sequences are usually presented from the 5′ end to the 3′ end. For DNA, the sense strand is used. Because nucleic acids are normally linear (unbranched) polymers, specifying the sequence is equivalent to defining the covalent structure of the entire molecule. For this reason, the nucleic acid sequence is also termed the primary structure.

[0053] As used herein, an “amino acid sequence” is a series of two or more amino acids. As used herein, a “Protein”, “peptide”, “polyprotein”, or “polypeptide” is a contiguous string of two or more amino acids. Typically, a polypeptide is a sequence of amino acids that is 41 amino acids or more amino acids, a protein may comprise one or more polypeptides, and a peptide is an amino acid sequence that is 40 amino acids or less.

[0054] As used herein, the terms “isolated polynucleotide” or “isolated polypeptide” include a polynucleotide (e.g., RNA or DNA) or a polypeptide, respectively, which are partially (to any degree) or fully separated from other components that are normally found in cells or in recombinant DNA expression systems. These components include, but are not limited to, cell membranes, cell walls, ribosomes, polymerases, serum components and extraneous genomic sequences. An isolated polynucleotide or polypeptide will, in an embodiment of the invention, be an essentially homogeneous composition.

[0055] As used herein, a polynucleotide comprises a nucleotide sequence comprising an open reading frame (“ORF”) encoding one or more polypeptides, which may be “operably linked” to transcription and/or translation regulatory sequences, including promoters, internal ribosome entry sites (IRES) and other ribosome binding site sequences, enhancers, response elements, suppressors, signal sequences, transcription termination sequences, polyadenylation sequences, introns, 5′- and 3′-non-coding regions, and the like.

[0056] In general, transcription regulatory sequences include but are not limited to promoters, transcription enhancer sequences, response elements, transcription termination sequences and polyadenylation sequences.

[0057] In general, translation regulatory sequences include but are not limited to ribosome entry sites and other ribosome binding sequences, and translation termination sequences comprising one or more translation stop codons.

[0058] In general, a “promoter” or “promoter sequence” is a DNA regulatory region capable of binding an RNA polymerase in a cell (e.g., directly or through other promoter-bound proteins or substances) and initiating transcription of a coding sequence (open reading frame (“ORF”). A promoter sequence is, in general, linked at its 3′ terminus to a transcription initiation site and extends upstream in the 5′ direction to include the minimum number of bases or elements necessary to initiate transcription at any level. Within the promoter sequence may be found a transcription initiation site (conveniently defined, for example, by mapping with nuclease S1), as well as protein binding domains (consensus sequences) responsible for the binding RNA polymerase. The promoter may be operably associated with other expression control sequences, including enhancer and repressor sequences, or with a polynucleotide of the present invention. Promoters which may be used to control gene expression include, but are not limited to, cytomegalovirus (CMV) promoter (U.S. Pat. Nos. 5,385,839 and 5,168,062), the SV40 early promoter region (Benoist et al., (1981) Nature 290:304-310), the promoter contained in the 3′ long terminal repeat of Rous sarcoma virus (Yamamoto et al., (1980) Cell 22:787-797), the herpes thymidine kinase promoter (Wagner et al., (1981) Proc. Natl. Acad. Sci. USA 78:1441-1445), the regulatory sequences of the metallothionein gene (Brinster et al., (1982) Nature 296:39-42); prokaryotic expression vectors such as the β-lactamase promoter (Villa-Komaroff et al., (1978) Proc. Natl. Acad. Sci. USA 75:3727-3731), or the tac promoter (DeBoer et al., (1983) Proc. Natl. Acad. Sci. USA 80:21-25); see also “Useful proteins from recombinant bacteria” in Scientific American (1980) 242:74-94; and promoter elements from yeast or other fungi such as the Gal 4 promoter, the ADC (alcohol dehydrogenase) promoter, PGK (phosphoglycerol kinase) promoter or the alkaline phosphatase promoter.

[0059] As used herein, the terms “express” and “expression” mean allowing or causing the information in a gene, RNA sequence, or DNA sequence to become manifest; for example, producing a protein by activating the cellular functions involved in transcription and translation of a corresponding gene. A DNA sequence is expressed in or by a cell to form an “expression product” such as an RNA (e.g., mRNA) or a protein. The expression product itself may also be said to be “expressed” by the cell.

[0060] As used herein, the term “vector” includes a vehicle (e.g., a plasmid or viral vector) by which a DNA or RNA polynucleotide may be introduced into a host cell, so as to transform the host cell and, optionally, promote expression and/or replication of the introduced sequence.

[0061] As used herein, the term “host cell” includes any cell of any organism that is isolated, selected, modified, transfected, transformed, grown, or used or manipulated in any way, for the production of a substance by the cell, for example the expression or replication, by the cell, of a gene, a DNA or RNA polynucleotide or a protein (e.g., sodium channel). Any cell type capable of expression of the voltage-gated sodium channel alpha subunit and beta subunit polypeptides via the expression system of the present invention can be used in the present invention as a host cell for expression of a sodium channel. Those having ordinary skill in the art can select a particular host cell line that is best suited for expressing a voltage-gated sodium channel polypeptide and selectable marker gene, e.g., via a vector. The present invention includes embodiments wherein the host cells are mammalian cells and cell lines and cell cultures derived therefrom. In particular embodiments, the cell type is a Chinese hamster ovary (CHO) cell (e.g., CHO K1, DG44 and DUXB11), Chinese hamster fibroblast (e.g., R1610), human cervical carcinoma (e.g., HELA), monkey kidney line (e.g., CVI and COS), murine fibroblast (e.g., BALBc/3T3), murine myeloma (P3X63-Ag3.653; NS0; SP2/O), hamster kidney line (e.g., HAK), murine L cell (e.g., L-929), human lymphocyte (e.g., RAJI), human kidney (e.g., 293 and 293T). Host cell lines are typically commercially available (e.g., from BD Biosciences, Lexington, Ky.; Promega, Madison, Wis.; Life Technologies, Gaithersburg, Md.) or from the American Type Culture Collection (ATCC, Manassas, Va.). Host cells also include bacterial cells (e.g., E. coli), insect cells such as Spodoptera frugiperda cells, SF-900, SF9, SF21 or Trichoplusia ni cells and mammalian cells such as, HEK293 cells, human amniocyte cells, murine macrophage J774 cells or any other macrophage cell line and human intestinal epithelial Caco2 cells. In an embodiment of the invention, a host cell is a lower eukaryotic or fungal cell, e.g., a yeast cell such as a glycoengineered yeast cell that produces human-like glycosylation on expressed proteins, e.g., Pichia pastoris, Pichia finlandica, Pichia trehalophila, Pichia koclamae, Pichia membranaefaciens, Pichia minuta (Ogataea minuta, Pichia lindneri), Pichia opuntiae, Pichia thermotolerans, Pichia salictaria, Pichia guercuum, Pichia pfjperi, Pichia stiptis, Pichia methanolica, Pichia sp., Saccharomyces cerevisiae, Saccharomyces sp., Hansenula polymorpha, Kluyveromyces sp., Kluyveromyces lactis or Candida albicans.

[0062] As used herein, the term “percent identity” with respect to nucleotide and amino acid sequences refers to the number of exact nucleotide or amino acids matches between nucleotide or amino acid sequences being compared. Sequence homology, not to be confused with sequence identity, refers to the biological homology between DNA, RNA, or protein sequences, defined in terms of shared ancestry in the evolutionary history of life. The following references regarding the BLAST algorithm are herein incorporated by reference: BLAST ALGORITHMS: Altschul, S. F., et al., (1990) J. Mol. Biol. 215:403-410; Gish, W., et al., (1993) Nature Genet. 3:266-272; Madden, T. L., et al., (1996) Meth. Enzymol. 266:131-141; Altschul, S. F., et al., (1997) Nucleic Acids Res. 25:3389-3402; Zhang, J., et al., (1997) Genome Res. 7:649-656; Wootton, J. C., et al., (1993) Comput. Chem. 17:149-163; Hancock, J. M., et al., (1994) Comput. Appl. Biosci. 10:67-70; ALIGNMENT SCORING SYSTEMS: Dayhoff, M. O., et al., “A model of evolutionary change in proteins.” in Atlas of Protein Sequence and Structure, (1978) vol. 5, suppl. 3. M. O. Dayhoff (ed.), pp. 345-352, Natl. Biomed. Res. Found., Washington, D.C.; Schwartz, R. M., et al., “Matrices for detecting distant relationships.” in Atlas of Protein Sequence and Structure, (1978) vol. 5, suppl. 3.” M. O. Dayhoff (ed.), pp. 353-358, Natl. Biomed. Res. Found., Washington, D.C.; Altschul, S. F., (1991) J. Mol. Biol. 219:555-565; States, D. J., et al., (1991) Methods 3:66-70; Henikoff, S., et al., (1992) Proc. Natl. Acad. Sci. USA 89:10915-10919; Altschul, S. F., et al., (1993) J. Mol. Evol. 36:290-300; ALIGNMENT STATISTICS: Karlin, S., et al., (1990) Proc. Natl. Acad. Sci. USA 87:2264-2268; Karlin, S., et al., (1993) Proc. Natl. Acad. Sci. USA 90:5873-5877; Dembo, A., et al., (1994) Ann. Prob. 22:2022-2039; and Altschul, S. F. “Evaluating the statistical significance of multiple distinct local alignments.” in Theoretical and Computational Methods in Genome Research (S. Suhai, ed.), (1997) pp. 1-14, Plenum, New York.

[0063] As used herein, “sodium channel” refers to a complex having a Navα subunit and one or more Navβ subunits from any organism, e.g., human, mouse, monkey. Sodium channels include the Nav1.1, Nav1.2, Nav1.3, Nav1.4, Nav1.5, Nav1.6, Nav1.7, Nav1.8, or Nav1.9 sodium channels. The sodium channels include a Navα subunit and one or more Navβ subunits. Sodium channel Navα subunits include, for example, Nav1.1α, Nav1.2α, Nav1.3α, Nav1.4α, Nav1.5α, Nav1.6α, Nav1.7α, Nav1.8α, or Nav1.9α subunits. The Navβ subunits include for example, Navβ1, Navβ2, or Navβ3 subunits. In an embodiment of the invention, the Nava subunit is human NaV1.7α subunit, e.g., 5N11S splice variant, or mouse Nav1.7α subunit, e.g., splice variant. In an embodiment of the invention, the Navα subunit is a Nav1.7α subunit. In an embodiment of the invention, the Navα subunit is from a tetrodotoxin-sensitive sodium channel (e.g., a Nav1.1, Nav1.6, or Nav1.7 subunit). In an embodiment of the invention, the sodium channel comprises Navα and Navβ subunits, which are each separate polypeptides and not fusion proteins comprising two or more Navα and Navβ subunits. Sodium channels may include all subunits from the same organism or different organisms, e.g., human Navα protein subunit and one or more non-human Navβ protein subunits.

[0064] As used herein, a “lipoparticle” means a small particle of about ten nanometers to about one micrometer, comprising an external lipid bilayer, which comprises one or more viral structural proteins and one or more cellular proteins. The lipoparticle is based on retrovirus structures and enables structurally intact cellular proteins to be purified away from the cell. Briefly, when a retrovirus is produced from a cell, the protein core of the virus buds through the membrane of the cell. As a consequence, the virus becomes enwrapped by the cellular membrane. Once the membrane ‘pinches’ off, the virus particle is free to diffuse. Normally, the virus also produces its own membrane protein (Envelope) that is expressed on the cell surface and that becomes incorporated into the virus. However, if the gene for the viral membrane protein is deleted, virus assembly and budding can still occur. Under these conditions, the membrane enwrapping the virus contains on or more cellular proteins, which in the context of the present invention, a sodium channel comprising a Navα protein subunit and one or more Navβ protein subunits.

[0065] As used herein, a “2A self-cleaving peptide” or “2A cleavage peptide” is a peptide from a class of 18-22 amino acid peptides, which can induce the cleaving of a polyprotein in a cell during translation. These peptides share a core sequence motif of DXEXNPGP (SEQ ID NO: 84), and are found in a wide range of viral families. They help break apart polyproteins by causing the ribosome to fail at making a peptide bond. The cleavage is triggered by breaking the peptide bond between the P and G at the C-terminus of the viral 2A peptide, resulting in the polypeptide located upstream of the 2A peptide cleavage peptide to be attached at its C-terminal end to the G of the 2A peptide cleavage peptide while the polypeptide located downstream of the 2A peptide cleavage peptide will have an extra Proline on its N-terminal end. The exact molecular mechanism of 2A-peptide-mediated cleavage is unknown. However, it is believed the “cleavage” may involve ribosomal “skipping” of glycyl-prolyl peptide bond formation rather than true proteolytic cleavage.

### Molecular Biology

[0066] In accordance with the present invention, there may be employed conventional molecular biology, microbiology, and recombinant DNA techniques within the skill of the art. Such techniques are explained fully in the literature. See, e.g., Sambrook, Fritsch & Maniatis, Molecular Cloning: A Laboratory Manual, Second Edition (1989) Cold Spring Harbor Laboratory Press, Cold Spring Harbor, N.Y. (herein “Sambrook, et al., 1989”); DNA Cloning: A Practical Approach, Volumes I and II (D. N. Glover ed. 1985); Oligonucleotide Synthesis (M. J. Gait ed. 1984); Nucleic Acid Hybridization (B. D. Hames & S. J. Higgins eds. (1985)); Transcription And Translation (B. D. Hames & S. J. Higgins, eds. (1984)); Animal Cell Culture (R. I. Freshney, ed. (1986)); Immobilized Cells And Enzymes (IRL Press, (1986)); B. Perbal, A Practical Guide To Molecular Cloning (1984); F. M. Ausubel, et al. (eds.), Current Protocols in Molecular Biology, John Wiley & Sons, Inc. (1994).

### Introduction

[0067] To increase voltage-gated sodium channel functional expression in in vitro assays, polynucleotides are provided that encode a single polyprotein comprising a Navα subunit in tandem with one or more Navβ subunits, each subunit separated from the other subunits by a cleavage peptide, for example, a virally derived self-cleaving 2A peptide sequence. The single polyprotein is encoded by a polynucleotide in which the ORF encoding the polyprotein is operably linked to transcription regulatory elements. The polypeptide, which may be a deoxyribonucleic acid (DNA) molecule, can be transcribed into a polycistronic ribonucleic acid (RNA) that can be translated into the polyprotein that is cleaved at a site within the cleavage peptide either co-translationally or post-translationally into the Navα subunit and the one or more Navβ subunits. In embodiments in which the cleavage peptide is a 2A self-cleaving peptide, the 2A peptide results in cleavage or ribosome skipping at a Gly-Pro (GP) site within the self-cleaving peptide, thus resulting in liberated Navα and Navβ subunits. Thus, the voltage-gated sodium channel expression system may increase the total expression of Navα and Navβ subunits and/or an increase functional expression of Navα and Navβ subunits; along with methods of use thereof.

### Voltage-Gated Sodium Channel Expression System

[0068] The present invention provides a voltage-gated sodium channel expression system that exhibits enhanced or higher expression levels when expressed in a host cell. The voltage-gated sodium channel expression system provides a polynucleotide comprising an ORF that is capable of being transcribed to produce a polycistronic RNA message that can then be translated to produce a polyprotein that comprises both a Navα subunit and one or more Navβ subunits, each subunit separated from the other subunits by a cleavage peptide, and wherein the polynucleotide is operably linked to expression control elements at the 5′ and 3′ ends to provide a transcription unit. The Navα and Navβ subunits encoded by the polycistronic RNA message are not directly fused to each other. In particular embodiments, the polyprotein encoded by the polycistronic RNA message has the general structure from the N-terminus

(Navα subunit)—(cleavage peptide—Navβ subunit)ₙ,

wherein Navα protein subunit is selected from the group consisting of Navlia, Nav1.2α, Nav1.3α, Nav1.4α, Nav1.5α, Nav1.6α, Nav1.7α, Nav1.8α, or Nav1.9α subunits; each Navβ subunit is independently selected from the group consisting of Navβ1, Navβ2, Navβ3, and Nav β4 subunits with the proviso that the polyprotein comprising more than one Navβ subunit comprises no more than one copy of any one of Navβ1, Navβ2, Navβ3, or Navβ4 subunit; and n is 1, 2, 3, or 4; or

(Navβ-cleavage peptide)ₙ—(Navα subunit),

wherein Navα subunit is selected from the group consisting of Nav1.1α, Nav1.2α, Nav1.3α, Nav1.4α, Nav1.5α, Nav1.6α, Nav1.7α, Nav1.8α, or Nav1.9α subunits; each Navβ subunit is independently selected from the group consisting of Navβ1, Navβ2, Navβ3, and Navβ4 subunits with the proviso that the polyprotein comprising more than one Navβ comprises no more than one copy of any one of Navβ1, Navβ2, Navβ3, or Navβ4 subunit; and n is 1, 2, 3, or 4.

[0069] In an embodiment of the invention, the cleavage peptides that separate the subunits are viral 2A peptides that comprise a core motif comprising the amino acid sequence DXEXNPGP (SEQ ID NO: 84). In particular embodiments, the P is at the C-terminus of the viral 2A peptide. In other embodiments, the P is followed by a peptide sequence of two to 40 amino acids. For example, the P may be followed by a Histidine tag of about six to 10 H residues or a 1×, 2×, or 3× FLAG or MYC peptide.

[0070] In a particular embodiment of the invention, the cleavage peptides that separate the subunits are viral P2A peptides that comprise the amino acid sequence GSGATNFSLLKQAGDVEENPGP (SEQ ID NO: 1), and which may be encoded by a polynucleotide comprising the nucleotide sequence set forth in SEQ ID NO: 2. In particular embodiments, In other embodiments, the P is followed by a peptide sequence of two to 40 amino acids. For example, the P may be followed by a Histidine tag of about six to 10 H residues or a 1×, 2×, or 3× FLAG or MYC peptide.

[0071] The present invention includes embodiments in which the polyprotein is expressed and processed co-translationally to provide the individual Navα and Navβ subunits. The present invention further includes an embodiment wherein the polycistronic mRNA message is processed post-transcriptionally to generate individual RNA messages, each encoding a single Navα or Navβ subunit, which may then be translated from the individual RNA messages. In this embodiment, each Navα and Navβ subunit ORF is preceded at the 5′ and 3′ ends with the appropriate nucleotide sequences necessary for translation of the individual RNA messages to provide a translation unit that is separated by any other translation unit by a cleavage peptide.

[0072] In an embodiment of the invention, the polynucleotide comprising the transcription unit is within a vector, such as a plasmid or viral vector. In particular embodiments, the viral vector is derived from HIV-1, lentivirus, or Maloney Murine Leukemia (MLV) virus).

[0073] Thus, a voltage-gated sodium channel expression system of the present invention comprises a polynucleotide comprising an ORF encoding a Navα subunit and one or more Navβ subunits, each separated by a cleavage peptide. The ORF is flanked by transcription regulatory elements. Transcription of the ORF produces a polycistronic RNA message that may be translated into a single polyprotein comprising a Navα subunit and one or more Navβ subunits, each separated by a peptide comprising a cleavage peptide. During translation of the polycistronic RNA message, the cleavage peptide is cleaved at a specific site to generate individual Navα and Navβ subunits.

[0074] The voltage-gated sodium channel expression system may be transiently transfected into a host cell, or stably transfected into a host cell provided the voltage-gated sodium channel expression system further includes one or more nucleotide sequences that enable the voltage-gated sodium channel expression system to be integrated into the genome of the host cell. Methods for transfecting host cells and for integrating polynucleotides into a host cell are known in the art. The present invention thus includes a method for making a recombinant host cell comprising the voltage-gated sodium channel expression system as disclosed herein integrated into the host cell genome comprising the steps of introducing a polynucleotide comprising the voltage-gated sodium channel expression system and nucleotides that enable integration of the polynucleotide into the host cell genome under conditions that permit integration of heterologous polynucleotides into a host cell genome by homologous recombination or site-specific recombination.

[0075] In an embodiment of the invention, the method comprises introducing a circular plasmid vector comprising the voltage-gated sodium channel expression system as disclosed herein and a polynucleotide comprising a recombinase recognition site into a host cell comprising a recombinase recognition site integrated into the chromosome of the host cell and a gene encoding a recombinase that recognizes the recombination recognition sites, wherein under appropriate conditions the recombinase facilitates integration of the voltage-gated sodium channel expression system into the chromosomal genome via the recombination recognition sites. Thus, in an embodiment of the invention, the method includes the step of introducing a polynucleotide encoding the recombinase operably linked to transcription control elements into a host cell to provide a recombinant host cell capable of expressing the recombinase. In an embodiment of the invention, the recombinase is Cre and the site is LoxP comprising the nucleotide sequence set forth in SEQ ID NO: 3; or the recombinase is Flp recombinase and the site is an FRT site comprising the nucleotide sequence set forth in SEQ ID NO: 4 or SEQ ID NO: 5 (Craig. Ann. Rev. Genet. 22: 77-105 (1988); Sauer. Curr. Opin. Biotechnol. 5: 521-527 (1994)).

[0076] In an embodiment of the invention, the voltage-gated sodium channel expression system comprises a human, mouse, or rhesus monkey Navα subunit and/or one or more of human, mouse, or rhesus monkey Navβ subunits. The voltage-gated sodium channel expression system may comprise any one of the following exemplary Navα subunits encoded within the polycistronic RNA message or expressed therefrom:
[0077] (i) a human Nav1.1α subunit comprising the amino acid sequence set forth in SEQ ID NO: 6 and is encoded by a polynucleotide, which in particular embodiments, may have the nucleotide sequence set forth in SEQ ID NO: 7;
[0078] (ii) a human Nav1.2α subunit comprising the amino acid sequence set forth in SEQ ID NO: 8 and is encoded by a polynucleotide, which in particular embodiments, may have the nucleotide sequence set forth in SEQ ID NO: 9;
[0079] (iii) a human Nav1.3α subunit comprising the amino acid sequence set forth in SEQ ID NO: 10 and is encoded by a polynucleotide, which in particular embodiments, may have the nucleotide sequence set forth in SEQ ID NO: 11;
[0080] (iv) a human Nav1.4α subunit comprising the amino acid sequence set forth in SEQ ID NO: 12 and is encoded by a polynucleotide, which in particular embodiments, may have the nucleotide sequence set forth in SEQ ID NO: 13;
[0081] (v) a human Nav1.5α subunit comprising the amino acid sequence set forth in SEQ ID NO: 14 and is encoded by a polynucleotide, which in particular embodiments, may have the nucleotide sequence set forth in SEQ ID NO: 15;
[0082] (vi) a Nav1.6α subunit comprising the amino acid sequence set forth in SEQ ID NO: 16 and is encoded by a polynucleotide, which in particular embodiments, may have the nucleotide sequence set forth in SEQ ID NO: 17;
[0083] (vii) a human Nav1.7α subunit comprising the amino acid sequence set forth in SEQ ID NO: 18 and is encoded by a polynucleotide, which in particular embodiments, may have the nucleotide sequence set forth in SEQ ID NO: 19;
[0084] (viii) a human Nav1.8α subunit comprising the amino acid sequence set forth in SEQ ID NO: 20 and is encoded by a polynucleotide, which in particular embodiments, may have the nucleotide sequence set forth in SEQ ID NO: 21; and
[0085] (ix) a human Nav1.9α subunit comprising the amino acid sequence set forth in SEQ ID NO: 86 and is encoded by a polynucleotide, which in particular embodiments, may have the nucleotide sequence set forth in SEQ ID NO: 87.

[0086] The voltage-gated sodium channel expression system may comprise any one or more of the following exemplary Navβ subunit encoded within the polycistronic RNA message or expressed therefrom:
[0087] (a) a human Navβ1 subunit comprising the amino acid sequence set forth in SEQ ID NO: 22 and is encoded by a polynucleotide, which in particular embodiments, may have the nucleotide sequence set forth in SEQ ID NO: 23;
[0088] (b) a human Navβ2 subunit comprising the amino acid sequence set forth in SEQ ID NO: 24 and is encoded by a polynucleotide, which in particular embodiments, may have the nucleotide sequence set forth in SEQ ID NO: 25;
[0089] (c) a human Navβ3 subunit comprising the amino acid sequence set forth in SEQ ID NO: 26 and is encoded by a polynucleotide, which in particular embodiments, may have the nucleotide sequence set forth in SEQ ID NO: 27; and
[0090] (d) a human Navβ4 subunit comprising the amino acid sequence set forth in SEQ ID NO: 88 and is encoded by a polynucleotide, which in particular embodiments, may have the nucleotide sequence set forth in SEQ ID NO: 89.

[0091] In particular embodiments of the exemplary Navα or Navβ subunits, the Navα or Navβ subunit comprises an amino acid sequence having at least about 80-99.9% (in specific embodiments, 80, 81, 82, 83, 84, 85, 86, 87, 88, 89, 90, 91, 92, 93, 94, 95, 96, 97, 98, 99, 99.5, or 99.9%) identity to an amino acid sequence set forth in any of the amino acid sequences disclosed herein; when the comparison is performed by a BLAST algorithm wherein the parameters of the algorithm are selected to give the largest match between the respective sequences over the entire length of the respective reference sequences provided that a voltage-gated sodium channel comprising such a Navα and β subunit(s) assemble into sodium channels that maintain the ability to conduct sodium ions through a membrane compared to that of the native or wild-type Nava and Navβ protein subunits.

[0092] In particular embodiments of the exemplary Navα or Navβ subunits, the polynucleotide that encodes a Navα or Navβ subunit has at least about 80-99.9% (in specific embodiments, 80, 81, 82, 83, 84, 85, 86, 87, 88, 89, 90, 91, 92, 93, 94, 95, 96, 97, 98, 99, 99.5, or 99.9%) identity to a polynucleotide sequence set forth in any of the nucleotide sequences disclosed herein; when the comparison is performed by a BLAST algorithm wherein the parameters of the algorithm are selected to give the largest match between the respective sequences over the entire length of the respective reference sequences provided that a sodium channel comprising such a Navα and Navβ subunit(s) assemble into sodium channels that maintain the ability to conduct sodium ions through a membrane compared to that of the native or wild-type Navα and β subunits.

[0093] The voltage-gated sodium channel expression system may comprise a polynucleotide encoding a polyprotein comprising a Navα subunit and one or more Navβ1 subunits wherein the Navα subunits and the Navβ subunits may be in any order with the proviso that each subunit protein is separated from any adjacent subunit by a cleavage peptide and the polyprotein comprising more than one Navβ subunit comprises no more than one copy of any one of Navβ1, Navβ2, Navβ3, or Navβ4 subunits. For example, the order from the N-terminus may be exemplified by any one of the following structures:
[0094] Navα-x-Navβ;
[0095] Navβ-x-Navα;
[0096] Navα-x-Navβ-x-Navβ;
[0097] Navβ-x-Navβ-x-Navα;
[0098] Navβ-x-Navα-x-Navβ;
[0099] Navα-x-Navβ-x-Navβ-x-Navβ;
[0100] Navβ-x-Navβ-x-Navβ-x-Navα;
[0101] Navβ-x-Navβ-x-Navα-x-Navβ;
[0102] Navβ-x-Navα-x-Navβ-x-Navβ;
[0103] Navα-x-Navβ-x-Navβ-x-Navβ-x-Navβ;
[0104] NavβA-x-Navβ-x-Navβ-x-Navβ-x-Navα;
[0105] Navβ-x-Navβ-x-Navβ-x-Navα-x-Navβ;
[0106] Navβ-x-Navβ-x-Navα-x-Navβ-x-Navβ; or
[0107] Navβ-x-Navα-x-Navβ-x-Navβ-x-Navβ;

[0108] wherein the Navα subunit is selected from the group consisting of Nav1.1α, Nav1.2α, Nav1.3α, Nav1.4α, Nav1.5α, Nav1.6α, Nav1.7α, Nav1.8α, or Nav1.9α subunits; each Navβ subunit is independently selected from the group consisting of Navβ1, Navβ2, Navβ3, and Nav β4 subunit with the proviso that the polyprotein comprising more than Navβ subunit comprises no more than one copy of any one of Navβ1, Navβ2, Navβ3, or Navβ4 subunits; and x is a cleavage peptide, which in particular embodiments may be a viral 2A peptide, which in a further embodiment is a viral P2A peptide.

[0109] Exemplary polyproteins include and may be selected from any one of the following polyproteins:
[0110] (1) Navα1.1-P2A-Navβ1 comprising the amino acid sequence set forth in SEQ ID NO: 34 and which may be encoded by a polynucleotide comprising the nucleotide sequence set forth in SEQ ID NO: 58;
[0111] (2) Navα1.1-P2A-Navβ1-P2A-Navβ2 comprising the amino acid sequence set forth in SEQ ID NO: 35 and which may be encoded by a polynucleotide comprising the nucleotide sequence set forth in SEQ ID NO: 59;
[0112] (3) Navα1.1-P2A-Navβ1-P2A-Navβ2-P2A-Navβ3 comprising the amino acid sequence set forth in SEQ ID NO: 36 and which may be encoded by a polynucleotide comprising the nucleotide sequence set forth in SEQ ID NO: 60;
[0113] (4) Navα1.2-P2A-Navβ1 comprising the amino acid sequence set forth in SEQ ID NO: 37 and which may be encoded by a polynucleotide comprising the nucleotide sequence set forth in SEQ ID NO: 61;
[0114] (5) Navα1.2-P2A-Navβ1-P2A-Navβ2 comprising the amino acid sequence set forth in SEQ ID NO: 38 and which may be encoded by a polynucleotide comprising the nucleotide sequence set forth in SEQ ID NO: 62;
[0115] (6) Navα1.2-P2A-Navβ1-P2A-Navβ2-P2A-Navβ3 comprising the amino acid sequence set forth in SEQ ID NO: 39 and which may be encoded by a polynucleotide comprising the nucleotide sequence set forth in SEQ ID NO: 63;
[0116] (7) Navα1.3-P2A-Navβ1 comprising the amino acid sequence set forth in SEQ ID NO: 40 and which may be encoded by a polynucleotide comprising the nucleotide sequence set forth in SEQ ID NO: 64;
[0117] (8) Navα1.3-P2A-Navβ1-P2A-Navβ2 comprising the amino acid sequence set forth in SEQ ID NO: 41 and which may be encoded by a polynucleotide comprising the nucleotide sequence set forth in SEQ ID NO: 65;
[0118] (9) Navα1.3-P2A-Navβ1-P2A-Navβ2-P2A-Navβ3 comprising the amino acid sequence set forth in SEQ ID NO: 42 and which may be encoded by a polynucleotide comprising the nucleotide sequence set forth in SEQ ID NO: 66;
[0119] (10) Navα1.4-P2A-Navβ1 comprising the amino acid sequence set forth in SEQ ID NO: 43 and which may be encoded by a polynucleotide comprising the nucleotide sequence set forth in SEQ ID NO: 67;
[0120] (11) Navα1.4-P2A-Navβ1-P2A-Navβ2 comprising the amino acid sequence set forth in SEQ ID NO: 44 and which may be encoded by a polynucleotide comprising the nucleotide sequence set forth in SEQ ID NO: 68;
[0121] (12) Navα1.4-P2A-Navβ1-P2A-Navβ2-P2A-Navβ3 comprising the amino acid sequence set forth in SEQ ID NO: 45 and which may be encoded by a polynucleotide comprising the nucleotide sequence set forth in SEQ ID NO: 69;
[0122] (13) Navα1.5-P2A-Navβ1 comprising the amino acid sequence set forth in SEQ ID NO: 46 and which may be encoded by a polynucleotide comprising the nucleotide sequence set forth in SEQ ID NO: 70;
[0123] (14) Navα1.5-P2A-Navβ1-P2A-Navβ2 comprising the amino acid sequence set forth in SEQ ID NO: 47 and which may be encoded by a polynucleotide comprising the nucleotide sequence set forth in SEQ ID NO: 71;
[0124] (15) Navα1.5-P2A-Navβ1-P2A-Navβ2-P2A-Navβ3 comprising the amino acid sequence set forth in SEQ ID NO: 48 and which may be encoded by a polynucleotide comprising the nucleotide sequence set forth in SEQ ID NO: 72;
[0125] (16) Navα1.6-P2A-Navβ1 comprising the amino acid sequence set forth in SEQ ID NO: 49 and which may be encoded by a polynucleotide comprising the nucleotide sequence set forth in SEQ ID NO: 73;
[0126] (17) Navα1.6-P2A-Navβ1-P2A-Navβ2 comprising the amino acid sequence set forth in SEQ ID NO: 50 and which may be encoded by a polynucleotide comprising the nucleotide sequence set forth in SEQ ID NO: 74;
[0127] (18) Navα1.6-P2A-Navβ1-P2A-Navβ2-P2A-Navβ3 comprising the amino acid sequence set forth in SEQ ID NO: 51 and which may be encoded by a polynucleotide comprising the nucleotide sequence set forth in SEQ ID NO: 75;
[0128] (19) Navα1.7-P2A-Navβ1 comprising the amino acid sequence set forth in SEQ ID NO: 52 and which may be encoded by a polynucleotide comprising the nucleotide sequence set forth in SEQ ID NO: 76;
[0129] (20) Navα1.7-P2A-Navβ1-P2A-Navβ2 comprising the amino acid sequence set forth in SEQ ID NO: 53 and which may be encoded by a polynucleotide comprising the nucleotide sequence set forth in SEQ ID NO: 77;
[0130] (21) Navα1.7-P2A-Navβ1-P2A-Navβ2-P2A-Navβ3 comprising the amino acid sequence set forth in SEQ ID NO: 54 and which may be encoded by a polynucleotide comprising the nucleotide sequence set forth in SEQ ID NO: 78;
[0131] (22) Navα1.8-P2A-Navβ1 comprising the amino acid sequence set forth in SEQ ID NO: 55 and which may be encoded by a polynucleotide comprising the nucleotide sequence set forth in SEQ ID NO: 79;
[0132] (23) Navα1.8-P2A-Navβ1-P2A-Navβ2 comprising the amino acid sequence set forth in SEQ ID NO: 56 and which may be encoded by a polynucleotide comprising the nucleotide sequence set forth in SEQ ID NO: 80; and
[0133] (24) Navα1.8-P2A-Navβ1-P2A-Navβ2-P2A-Navβ3 comprising the amino acid sequence set forth in SEQ ID NO: 57 and which may be encoded by a polynucleotide comprising the nucleotide sequence set forth in SEQ ID NO: 81.

[0134] In particular embodiments of the exemplary polyproteins, the polyprotein comprises an amino acid sequence has at least about 80-99.9% (in specific embodiments, 80, 81, 82, 83, 84, 85, 86, 87, 88, 89, 90, 91, 92, 93, 94, 95, 96, 97, 98, 99, 99.5, or 99.9%) identity to an amino acid sequence set forth in any of amino acid sequences disclosed herein; when the comparison is performed by a BLAST algorithm wherein the parameters of the algorithm are selected to give the largest match between the respective sequences over the entire length of the respective reference sequences provided that a voltage-gated sodium channel comprising such Navα and Navβ subunits cleaved from the polyprotein assemble into voltage-gated sodium channels that maintain the ability to conduct sodium ions through a membrane.

[0135] In particular embodiments of the exemplary polyproteins, the polynucleotide that encodes the polyprotein has at least about 80-99.9% (in specific embodiments, 80, 81, 82, 83, 84, 85, 86, 87, 88, 89, 90, 91, 92, 93, 94, 95, 96, 97, 98, 99, 99.5, or 99.9%) identity to a polynucleotide sequence set forth in any of the nucleotide sequences disclosed herein; when the comparison is performed by a BLAST algorithm wherein the parameters of the algorithm are selected to give the largest match between the respective sequences over the entire length of the respective reference sequences provided that a voltage-gated sodium channel comprising such Navα and Navβ subunits cleaved from the polyprotein encoded by the polynucleotide assemble into voltage-gated sodium channels that maintain the ability to conduct sodium ions through a membrane.

[0136] In embodiments wherein the cleavage peptide is a viral 2A peptide, the subunit preceding the GP cleavage peptide will comprise the 2A peptide amino acid sequence upstream of the cleavage site in the cleavage peptide and have the G residue at its C-terminus and the subunit downstream of the cleavage site in the cleavage peptide will have the P residue at its N-terminus. As an example, for a polycistronic RNA message encoding a Nav1.7α+P2A+Navβ1+P2A+Navβ2+P2A+Navβ3 polyprotein wherein the viral P2A peptide comprises the amino acid sequence GSGATNFSLLKQAGDVEENPGP (SEQ ID NO: 1), during translation of the polycistronic RNA message the expressed polyprotein is being cleaved between the GP residues of the P2A peptide as the polyprotein is being synthesized. The resulting Nav1.7α will comprise the amino acid sequence GSGATNFSLLKQAGDVEENPG (SEQ ID NO: 85) at its C-terminus. The resulting Navβ1 will comprise a P at its N-terminus and the amino acid sequence GSGATNFSLLKQAGDVEENPG (SEQ ID NO: 85) at its C-terminus. The resulting Navβ2 will comprise a P at its N-terminus and the amino acid sequence GSGATNFSLLKQAGDVEENPG (SEQ ID NO: 85) at its C-terminus. The resulting Navβ3 will comprise a P at its N-terminus.

[0137] Thus, the present invention provides a human Nav1.1α, Nav1.2α, Nav1.3α, Nav1.4α, Nav1.5α, Nav1.6α, Nav1.7α, Nav1.8α, or Nav1.9α subunit comprising the amino acid sequence GSGATNFSLLKQAGDVEENPG (SEQ ID NO: 85) at its C-terminus; a human Nav1.1α, Nav1.2α, Nav1.3α, Nav1.4α, Nav1.5α, Nav1.6α, Nav1.7α, Nav1.8α, or Nav1.9α subunit comprising a P at its N-terminus; or a human Nav1.1α, Nav1.2α, Nav1.3α, Nav1.4α, Nav1.5α, Nav1.6α, Nav1.7α, Nav1.8α, or Nav1.9α subunit comprising a P at its N-terminus and comprising the amino acid sequence GSGATNFSLLKQAGDVEENPG (SEQ ID NO: 85) at its C-terminus.

[0138] Thus, the present invention provides a human Navβ1 subunit comprising the amino acid sequence GSGATNFSLLKQAGDVEENPG (SEQ ID NO: 85) at its C-terminus; a human Navβ1 subunit comprising a P at its N-terminus; or a human Navβ1 subunit comprising a P at its N-terminus and comprising the amino acid sequence GSGATNFSLLKQAGDVEENPG (SEQ ID NO: 85) at its C-terminus.

[0139] Thus, the present invention provides a human Navβ2 subunit comprising the amino acid sequence GSGATNFSLLKQAGDVEENPG (SEQ ID NO: 85) at its C-terminus; a Navβ2 subunit comprising a P at its N-terminus; or a Navβ2 subunit comprising a P at its N-terminus and comprising the amino acid sequence GSGATNFSLLKQAGDVEENPG (SEQ ID NO: 85) at its C-terminus.

[0140] Thus, the present invention provides a human Navβ3 subunit comprising the amino acid sequence GSGATNFSLLKQAGDVEENPG (SEQ ID NO: 85) at its C-terminus; a Navβ3 subunit comprising a P at its N-terminus; or a Navβ3 subunit comprising a P at its N-terminus and comprising the amino acid sequence GSGATNFSLLKQAGDVEENPG (SEQ ID NO: 85) at its C-terminus.

[0141] In a further embodiment, the present invention provides a voltage-gated sodium channel comprising a human Nav1.1α, Nav1.2α, Nav1.3α, Nav1.4α, Nav1.5α, Nav1.6α, Nav1.7α, Nav1.8α, or Nav1.9α subunit comprising the amino acid sequence GSGATNFSLLKQAGDVEENPG (SEQ ID NO: 85) at the C-terminus and/or a P at the N-terminus; and, one or more of a human Navβ1 subunit comprising a P at its N-terminus and/or comprising the amino acid sequence GSGATNFSLLKQAGDVEENPG (SEQ ID NO: 85) at the C-terminus, a human Navβ2 subunit comprising a P at the N-terminus and/or comprising the amino acid sequence GSGATNFSLLKQAGDVEENPG (SEQ ID NO: 85) at the C-terminus, and a human Navβ3 subunit comprising a P at its N-terminus and/or comprising the amino acid sequence GSGATNFSLLKQAGDVEENPG (SEQ ID NO: 85) at the C-terminus, with the proviso that a first subunit comprises only a P at its N-terminus and a second subunit comprises only the amino acid sequence GSGATNFSLLKQAGDVEENPG (SEQ ID NO: 85) at the C-terminus, and third and/or fourth subunits, if present, comprise a P at the N-terminus and the amino acid sequence GSGATNFSLLKQAGDVEENPG (SEQ ID NO: 85) at the C-terminus.

[0142] In a further embodiment, the present invention provides a voltage-gated sodium channel comprising a human Nav1.1α, Nav1.2α, Nav1.3α, Nav1.4α, Nav1.5α, Nav1.6α, Nav1.7α, Nav1.8α, or Nav1.9α subunit comprising the amino acid sequence GSGATNFSLLKQAGDVEENPG (SEQ ID NO: 85) at the C-terminus and a human Navβ1 subunit comprising a P at the N-terminus.

[0143] In a further embodiment, the present invention provides a voltage-gated sodium channel comprising a human Nav1.1α, Nav1.2α, Nav1.3α, Nav1.4α, Nav1.5α, Nav1.6α, Nav1.7α, Nav1.8α, or Nav1.9α subunit comprising the amino acid sequence GSGATNFSLLKQAGDVEENPG (SEQ ID NO: 85) at the C-terminus, a human Navβ1 subunit comprising a P at the N-terminus and comprising the amino acid sequence GSGATNFSLLKQAGDVEENPG (SEQ ID NO: 85) at the C-terminus, and a human Navβ2 subunit comprising a P at the N-terminus.

[0144] In a further embodiment, the present invention provides a voltage-gated sodium channel comprising a human Nav1.1α, Nav1.2α, Nav1.3α, Nav1.4α, Nav1.5α, Nav1.6α, Nav1.7α, Nav1.8α, or Nav1.9α subunit comprising the amino acid sequence GSGATNFSLLKQAGDVEENPG (SEQ ID NO: 85) at the C-terminus, a human Navβ1 subunit comprising a P at the N-terminus and comprising the amino acid sequence GSGATNFSLLKQAGDVEENPG (SEQ ID NO: 85) at the C-terminus, a human Navβ2 subunit comprising a P at the N-terminus and comprising the amino acid sequence GSGATNFSLLKQAGDVEENPG (SEQ ID NO: 85) at the C-terminus, and a human Navβ3 subunit comprising a P at the N-terminus.

### Expression of Voltage-gated Sodium Channels

[0145] The present invention includes methods of using the voltage-gated sodium channel expression system of the present invention for expressing a sodium channel comprising a Navα subunit and one or more β subunits. In an embodiment, the method comprises (a) introducing a voltage-gated sodium channel expression system disclosed herein encoding a Nava subunit and one or more Navβ subunits into a host cell; (b) culturing the host cell in a culture medium under conditions suitable for expressing the voltage-gated sodium channel expression system to produce the Navα subunit and the one or more Navβ subunits assembled into a sodium channel in the host cell membrane; disrupting the host cell; and obtaining the host cell membrane comprising the voltage-gated sodium channel assembled therein.

[0146] The present invention also includes methods for making a lipoparticle comprising a voltage-gated sodium channel on the surface of the particle comprising (a) introducing a voltage-gated sodium channel expression system disclosed herein encoding a Navα subunit and one or more Navβ subunits into a host cell; (b) culturing the host cell in a culture medium under conditions suitable for expressing the voltage-gated sodium channel expression system to produce the Navα subunit and the one or more Navβ subunits assembled into a voltage-gated sodium channel in the host cell membrane, which form lipoparticles comprising the sodium channel; and, (c) obtaining lipoparticles comprising the voltage-gated sodium channel assembled therein.

[0147] The present invention also includes methods for making a lipid-enveloped virus-like particle comprising a voltage-gated sodium channel on the surface of the particle comprising (a) introducing a voltage-gated sodium channel expression system disclosed herein encoding a Navα subunit and one or more Navβ subunits in a virus vector into a host cell, wherein the virus vector does not support production of infectious virus; (b) culturing the host cell in a culture medium under conditions suitable for expressing the voltage-gated sodium channel expression system to produce the Navα subunit and the one or more Navβ subunits assembled into a sodium channel integrated into the host cell membrane, which form lipoparticles comprising the voltage-gated sodium channel and, (c) obtaining lipoparticles comprising the voltage-gated sodium channel assembled therein.

[0148] Methods for making lipoparticles are well known in the art and may be used to make lipoparticles comprising sodium channels according to the present invention (See e.g., Balliet & Bates. J Virol. 72:671-676 (1998); Endres et al. Science. 278:1462-1464 (1997); Hoffman et al. Proc Natl Acad Sci U S A. 97:11215-11220 (2000); and, Rucker. Methods Mol Biol. 228:317-328 (2003)). In an embodiment of the invention, the method further includes the step of purifying the lipoparticles, e.g., isolating particles from the supernatant of the host cells. In an embodiment of the invention, the lipoparticles may be purified by ultracentrifugation, CsCl gradient centrifugation, sucrose gradient purification, and/or dialysis. Lipoparticles comprising a voltage-gated sodium channel inserted, embedded, or integrated therein produced according to methods disclosed are also part of the present invention. In an embodiment of the invention, viral vectors may be for example, an HIV-1 virus derived vector or a Maloney Murine Leukemia (MLV) virus.

[0149] Lipoparticles may be purified using sucrose cushions, as described Balliet, et al. (1998), J. Virol., 72:671-676; Endres, et al. (1997), Science, 278:1462-1464; Hoffman, et al. (2000), Proc. Natl. Acad. Sci. USA, 97:11215-11220; and U.S. Pat. No. 8,574,590. Lipoparticles may also be purified using a number of methods that are often used to purify retroviruses, see for example, Arthur, et al. (1998), AIDS Res Human Retroviruses, 3:S311-9; Ausubel, et al. (2001), Current Protocols in Molecular Biology; Dettenhofer, et al. (1999), J Virol, 73:1460-7; Le Doux, et al. (2001), Hum Gene Ther, 12:1611-21; O'Neil, et al. (1993), Biotechnology (N Y), 11:173-8; Pham, et al. (2001), J Gene Med, 3:188-94; Prior, et al. (1995), BioPharm, 25-35; Prior, et al. (1996), BioPharm, 22-34; Richieri, et al. (1998), Vaccine, 16:119-129; and, Yamada, et al. (2003), Biotechniques, 34:1074-8, 1080.

[0150] In an embodiment of the invention, methods for making a voltage-gated sodium channel further comprise lysing the host cell and isolating a membrane fraction from the lysate containing the plasma membrane in which the voltage-gated sodium channel is integrated. Methods for preparing such membrane extracts are well known in the art. For example, in an embodiment of the invention, the method for expressing a voltage-gated sodium channel further comprises exposing the host cells expressing the voltage-gated sodium channel to a mild detergent such as triton X-100 (e.g., after the cells have been incubated in a hypotonic solution), disrupting the cells (e.g., by mechanical disruption such as sonication), and isolating the fraction of the lysate containing the cell membranes (e.g., by centrifugation and recovery of the supernatant of the lysate).

[0151] The voltage-gated sodium channel expression system polynucleotides of the present invention may be introduced or transformed into an appropriate host cell by various techniques well known in the art, e.g., electroporation, protoplast fusion, calcium phosphate precipitation, cell fusion with enveloped DNA, microinjection, and infection with intact virus (see, e.g., Ridgway, 1973, Vectors: Mammalian Expression Vectors, Chapter 24.2, pp. 470-472, Rodriguez and Denhardt eds., Butterworths, Boston, Mass.; Graham et al., 1973, Virology 52:456; Sambrook et al., 1989, Molecular Cloning: A Laboratory Manual, Cold Spring Harbor Laboratories, New York; Davis et al., 1986, Basic Methods in Molecular Biology, Elsevier; and Chu et al., 1981, Gene 13:197).

[0152] Cells used in the present invention may be cultured according to standard cell culture techniques, e.g., they can be fixed to a solid surface or grown in suspension in a suitable cell culture medium.

### Voltage-Gated Sodium Channel Assays

[0153] The present invention provides methods for identifying inhibitors of voltage-gated sodium channels that have been produced from a voltage-gated sodium channel expression system of the present invention, e.g., by a method of the present invention, e.g., as discussed herein. In an embodiment of the invention, a method for identifying a voltage-gated sodium channel inhibitor is provided that comprises: (a) expressing the voltage-gated sodium channel using a voltage-gated sodium channel expression system of the present invention according to an embodiment disclosed herein, (b) contacting the voltage-gated sodium channel integrated in a membrane with a candidate inhibitor under conditions supporting voltage-gated sodium channel activity; and (c) determining said activity wherein a reduction in the level of said activity relative to the level of activity in the absence of the candidate inhibitor identifies said candidate inhibitor as a voltage-gated sodium channel inhibitor.

[0154] The voltage-gated sodium channel polypeptide activity may be, in an embodiment of the invention, ion flux (e.g., Na⁺ flux) across a membrane or sodium channel Navβ subunit/Navα subunit binding. An inhibitor of a voltage-gated sodium channel may, thus, inhibit such activity at any detectable level (e.g., 1%, 5%, 10%, 25%, 50%, 75%, 90%, 95%, 99% or 100%, relative to activity in the absence of the inhibitor). An inhibitor of a voltage-gated sodium channel may also be characterized as a therapeutic agent for treating or preventing pain (e.g., neuropathic pain, chronic pain or pain from cancer) or epilepsy.

[0155] Inhibitors of voltage-gated sodium channel sodium flux may be determined, for example, by patch-clamp assay. Such assays are generally known in the art. For example, the present invention provides a patch clamp assay method comprising (i) expressing the voltage-gated sodium channel on the surface of a cell using a voltage-gated sodium channel expression system of the present invention, (ii) immobilizing the cell on the surface of a substrate such that the cell covers and seals an aperture on the substrate wherein one ionic solution contacts the cell surface on one side of the aperture and a separate ionic solution contacts the cell surface on the other side of the aperture; and (iii) determining electrical current across the cell. In this embodiment of the invention, current is determined in the presence and absence of a candidate inhibitor wherein a reduction in current in the presence of the candidate inhibitor (e.g., relative to current in the absence of the candidate inhibitor) indicates that the candidate inhibitor is a sodium channel inhibitor.

[0156] In an embodiment of the invention, the present invention comprises a method for identifying a voltage-gated sodium channel inhibitor with a competitive binding assay that comprises (i) providing a host cell comprising a voltage-gated sodium channel expression system of the present invention wherein the host cell expresses the voltage-gated sodium channel which then assembles into the plasma membrane of the host cell or into the outer surface of the membrane of a lipoparticle or in a membrane extract prepared from the host cell; (ii) contacting the voltage-gated sodium channel with a known voltage-gated sodium channel inhibitor or binder (e.g., tetrodotoxin, GpTx-1, ProTx-I or ProTx-II, lacosamide, a mu-conotoxin, an anti-sodium channel antibody, lidocaine, carbamazepine) and with a candidate inhibitor; and (iii) determining whether binding of the known voltage-gated sodium channel inhibitor is reduced in the presence of the candidate inhibitor (e.g., relative to known voltage-gated sodium channel inhibitor binding in the absence of the candidate inhibitor); wherein said reduction indicates that the candidate inhibitor is a voltage-gated sodium channel inhibitor. In an embodiment of the invention, the known voltage-gated sodium channel inhibitor is detectably labeled, for example, with a radiolabel, such as ³H, or fluorescent moiety.

[0157] In an embodiment of the invention, the present invention comprises a method for identifying a voltage-gated sodium channel inhibitor with a FLIPR® (fluorometric imaging plate reader) assay that makes use of a membrane potential indicator dye such as DiBAC4(3) (bis-(1,3-dibutylbarbituric acid)-trimethine oxonol). Distribution of the membrane potential indicator dye (e.g., DiBAC4(3)) across the cell membrane is dependent on the membrane potential. With depolarization, the membrane potential indicator dye further partitions into the cell, leading to an increase in fluorescence. Conversely hyperpolarization results in membrane potential indicator dye extrusion and thus, a decrease in fluorescence. In an embodiment of the invention, the method comprises (i) expressing the voltage-gated sodium channel on the surface of a cell, using a voltage-gated sodium channel expression system of the present invention; (ii) monitoring the fluorescence of a cell expressing the voltage-gated sodium channel on the surface of the cell in the presence of a membrane potential indicator dye (e.g., DiBAC4(3)) and in the presence of a candidate inhibitor of the sodium channel; wherein, greater fluorescence of the cell in the presence of the candidate inhibitor (e.g., relative to fluorescence in the absence of the candidate inhibitor) indicates that the candidate inhibitor is a voltage-gated sodium channel inhibitor.

[0158] A voltage-gated sodium channel inhibitor may be a small molecule or voltage-gated sodium channel binder. A voltage-gated sodium channel binder may be a human or humanized antibody, a monoclonal antibody, a labeled antibody, a bivalent antibody, a polyclonal antibody, a bispecific antibody, a chimeric antibody, a recombinant antibody, an anti-idiotypic antibody, a humanized antibody, a bispecific antibody, or a heavy chain antibody,

[0159] A voltage-gated sodium channel binder may be an antibody fragment such as a camelized single domain antibody, an immunoglobulin single variable domain (ISVD), a VHH, a diabody, an scfv, an scfv dimer, a dsfv, a (dsfv)₂, a dsFv-dsfv′, a bispecific ds diabody, an Fv, an Fab, an Fab′, an F(ab′)₂, or a domain antibody, which may be linked to an immunoglobulin constant region, e.g., a kappa or lambda light chain, gamma-1 heavy chain, gamma-2 heavy chain, gamma-3 heavy chain or gamma-4 heavy chain.

[0160] The voltage-gated sodium channel binder may bind an epitope on an extracellular portion of the voltage-gated sodium channel and comprise a continuous or discontinuous region on the Navα subunit or Navβ subunit or a discontinuous region that spans both the Navα and Navβ subunits.

### Use of the Voltage-Gated Sodium Channel Expression System to Identify an Antibody that Specifically Binds an Epitope of a Sodium Channel

[0161] Sodium channels expressed using the voltage-gated sodium channel expression system of the present invention may be used to immunize a host animal (e.g., non-human animal, rabbit, mouse, rat, dromedary, camel or llama) for the purposes of generating an antibody or antigen-binding fragment thereof that specifically binds to an epitope of the voltage-gated sodium channel. The epitope may be an extracellular portion of the voltage-gated sodium channel and comprise a continuous or discontinuous region on the Navα or Navβ subunit or a discontinuous region that spans both the Navα and Navβ subunits.

[0162] Thus, the present invention provides a method for immunizing a host animal with a voltage-gated sodium channel produced by a host cell expressing the voltage-gated sodium channel expression system of the present invention to produce an antibody or antigen-binding fragment thereof that binds specifically to an epitope of the voltage-gated sodium channel. In one embodiment, the method for producing the antibody or antigen-binding fragment thereof comprises transfecting a host cell with the voltage-gated sodium channel expression system of the present invention to provide a host cell comprising the sodium channel expression system that expresses a viral structural protein as disclosed herein; incubating the host cell in a culture medium under conditions for expressing the voltage-gated sodium channel expression system for a time sufficient for the host cell to produce the Navα subunit and one or more Navβ subunits and assemble them into voltage-gated sodium channels integrated into a membrane of the host cell; disrupting the host cells and obtaining membranes from the disrupted host cells or lipoparticles; and administering an amount of the membrane or lipoparticles to the host animal sufficient to elicit an immune response in the host animal that causes the host animal to produce antibodies or antigen binding fragments thereof against the voltage-gated sodium channel.

[0163] In another embodiment, the method for producing the antibody or antigen-binding fragment thereof comprises transfecting a host cell with the voltage-gated sodium channel expression system of the present invention contained within a viral vector that encodes a viral structural protein as disclosed herein to provide a host cell comprising the voltage-gated sodium channel expression system; incubating the host cell in a culture medium under conditions for expressing the voltage-gated sodium channel expression system for a time sufficient for the host cell to produce the Navα subunit and one or more Navβ subunits and assemble them into voltage-gated sodium channels integrated into the membrane of a lipoparticle; obtaining the lipoparticles from the culture medium; and administering an amount of the lipoparticles to the host animal sufficient to elicit an immune response in the host animal that causes the host animal to produce antibodies or antigen binding fragments against the voltage-gated sodium channel.

[0164] In an embodiment of the invention, a hybridoma is produced from an antibody-producing B-cell of the immunized host animal. In an embodiment of the invention, the method comprises making a voltage-gated sodium channel membrane preparation using the voltage-gated sodium channel expression system of the present invention as discussed herein, administering the voltage-gated sodium channel membrane preparation to a host animal, isolating an antibody-producing B-cell from the immunized host animal (e.g., by isolating splenocytes from the spleen of the animal) and fusing the B-cell with a myeloma cell (e.g., rat or mouse myeloma), thereby producing the hybridoma; and, optionally, isolating the antibody or antigen-binding fragment thereof from the hybridoma that binds an epitope of the voltage-gated sodium channel. In an embodiment of the invention, the hybridoma is cultured in a growth medium, such as HAT medium (i.e., medium containing hypoxanthine, aminopterin and thymidine). See e.g., Stites, et al. (eds.) Basic and Clinical Immunology (4th ed.), Lange Medical Publications, Los Altos, Calif., and references cited therein; Harlow and Lane (1988) Antibodies: A Laboratory Manual, CSH Press; Goding (1986) Monoclonal Antibodies: Principles and Practice (2d ed.), Academic Press, New York; and Kohler and Milstein (1975) in Nature 256:495-497.

[0165] In an embodiment of the invention, a membrane associated voltage-gated sodium channel obtained from a host cell expressing the voltage-gated sodium channel expression system of the present invention is used with an antibody phage display library to isolate an antibody or antigen-binding fragment thereof (e.g., ScFv, Fab or nanobody) that binds specifically to an epitope of the sodium channel.

[0166] In an embodiment of the invention, the method comprises making a voltage-gated sodium channel using the sodium channel expression system of the present invention (as discussed herein), displaying a library of phage molecules (e.g., M13 or Fd) on the surfaces of host cells (e.g., bacterial cells such as E.coli), wherein each phage displays an antibody or antigen-binding fragment thereof on its surface, and selecting the host cells displaying phages having binding specificity for an epitope of the voltage-gated sodium channel; isolating the host cell and phage from the other host cells and phages and determining the sequence of the antibody or antigen-binding fragment thereof displayed on the phage surface (e.g., by isolating phage genomic DNA and determining the sequence of the portion of the phage genome encoding the antibody or antigen-binding fragment thereof), and, optionally, isolating the antibody or fragment from the phage and/or host cell. See e.g., Methods in Molecular Biology, Antibody Phage Display Methods and Protocols, Philippa M. O'Brien & Robert Aitken (eds.), Humana Press, Inc. Totowa, NJ USA, 2002.

### Specific Embodiments of the Present Invention

[0167] 1. A voltage-gated sodium channel expression system comprising a polynucleotide encoding a polycistronic RNA message comprising an open reading frame (ORF) that encodes a polyprotein comprising a voltage-gated sodium channel alpha protein (Navα) subunit and one or more voltage-gated sodium channel accessory beta protein (Navβ) subunits, wherein each of the Navα and Navβ subunits are separated from an adjacent subunit by a cleavage peptide.
[0168] 2. The voltage-gated sodium channel expression system embodiment 1, wherein the Nava subunit is selected from the group consisting of Nav1.1α, Nav1.2α, Nav1.3α, Nav1.4α, Nav1.5α, Nav1.6α, Nav1.7α, Nav1.8α, and Nav1.9α subunits.
[0169] 3. The voltage-gated sodium channel expression system embodiment 1, wherein each Navβ subunit is selected from the group consisting of Navβ1, Navβ2, Navβ3, and Navβ4 subunits with the proviso that the polyprotein cannot comprise more than one copy of any one of Navβ1, Navβ2, Navβ3, or Navβ4 subunit.
[0170] 4. The voltage-gated sodium channel expression system embodiment 2, wherein the Nav1.1α, Nav1.2α, Nav1.3α, Nav1.4α, Nav1.5α, Nav1.6α, Nav1.7α, Nav1.8α, or Nav1.9α subunit is encoded by a polynucleotide that is at least 80% identical to a nucleotide sequence set forth in SEQ ID NOs: 7, 9, 11, 13, 15, 17, 19, 21, or 87, respectively.
[0171] 5. The voltage-gated sodium channel expression system embodiment 3, wherein the Navβ1, Navβ2, Navβ3, or Navβ4 subunit is encoded by a polynucleotide that is at least 80% identical to a nucleotide sequence set forth in SEQ ID NOs: 23, 25, 27, or 89, respectively.
[0172] 6. The voltage-gated sodium channel expression system embodiment 1, wherein the cleavage peptide is a viral P2A peptide.
[0173] 7. The voltage-gated sodium channel expression system embodiment 1, wherein the ORF comprises a nucleotide sequence with at least 80%, or in specific embodiments 90%, identity to a nucleotide sequence selected from the group of nucleotide sequences consisting of SEQ ID NOs: 58, 59, 60, 61, 62, 63, 64, 65, 66, 67, 68, 69, 70, 71, 72, 73, 74, 75, 76, 77, 78, 79, 80, and 81.
[0174] 8. The voltage-gated sodium channel expression system embodiment 1, wherein the polyprotein has 80%, or in specific embodiments 90%, identity to a polyprotein comprising an amino acid sequence selected from the group of amino acid sequences consisting of SEQ ID Nos: 34, 35, 36, 37, 38, 39, 40, 41, 42, 43, 44, 45, 46, 47, 48, 49, 50, 51, 52, 53, 54, 55, 56, and 57.
[0175] 9. A plasmid or viral vector comprising a nucleotide sequence encoding the polyprotein embodiment 8.
[0176] 10. A host cell comprising the plasmid or viral vector embodiment 9.
[0177] 11. A host cell comprising the voltage-gated sodium channel expression system embodiment 1.
[0178] 12. A method for making lipoparticles comprising a voltage-gated sodium channel integrated into the membrane of the lipoparticle, comprising:(a) introducing into an isolated host cell a viral vector comprising a polynucleotide encoding a polycistronic RNA message comprising an open reading frame (ORF) that encodes a polyprotein comprising a voltage-gated sodium channel alpha protein (Navα) subunit and one or more voltage-gated sodium channel accessory beta protein (Navβ) subunits, wherein each of the subunits is separated from adjacent subunits by a cleavage peptide; (b) culturing the host cell in a cell culture medium under conditions favorable for (i) transcription of the polycistronic RNA message from the polynucleotide and translation of the polycistronic RNA message into a polyprotein that is cleaved at the cleavage peptides to produce isolated Navα and isolated one or more Navβ subunits, and (ii) generation of lipoparticles, wherein the isolated Navα subunit and isolated one or more Navβ subunits form a voltage-gated sodium channel integrated into the membrane of the lipoparticles, and (c) isolating the lipoparticles from the host cells and/or host cell culture medium.
[0179] 13. The method embodiment 12, wherein the Navα subunit is selected from the group consisting of Nav1.1α, Nav1.2α, Nav1.3α, Nav1.4α, Nav1.5α, Nav1.6α, Nav1.7α, Nav1.8α, and Nav1.9α subunits.
[0180] 14. The method embodiment 12, wherein each Navβ subunit is selected from the group consisting of Navβ1, Navβ2, Navβ3, and Navβ4 subunits and with the proviso that the polyprotein cannot comprise more than one copy of any one of Navβ1, Navβ2, Navβ3, or Navβ4 subunit.
[0181] 15. The method embodiment 13, wherein the Nav1.1α, Nav1.2α, Nav1.3α, Nav1.4α, Nav1.5α, Nav1.6α, Nav1.7α, Nav1.8α, or Nav1.9α subunit is encoded by a polynucleotide that is at least 80% identical to a nucleotide sequence set forth in SEQ ID NOs: 7, 9, 11, 13, 15, 17, 19, 21, or 87, respectively.
[0182] 16. The method embodiment 14, wherein the Navβ1, Navβ2, Navβ3, or Navβ4 subunit is encoded by a polynucleotide that is at least 80% identical to a nucleotide sequence set forth in SEQ ID NOs: 23, 25, 27, or 89, respectively.
[0183] 17. The method embodiment 12, wherein the cleavage peptide is a viral P2A peptide.
[0184] 18. The method embodiment 12, wherein the ORF comprises a nucleotide sequence with at least 80%, or in specific embodiments 90%, identity to a nucleotide sequence selected from the group of nucleotide sequences consisting of SEQ ID NOs: 58, 59, 60, 61, 62, 63, 64, 65, 66, 67, 68, 69, 70, 71, 72, 73, 74, 75, 76, 77, 78, 79, 80, and 81.
[0185] 19. The method embodiment 12, wherein the polyprotein has 80%, or in specific embodiments 90%, identity to a polyprotein comprising an amino acid sequence selected from the group of amino acid sequences consisting of SEQ ID Nos: 34, 35, 36, 37, 38, 39, 40, 41, 42, 43, 44, 45, 46, 47, 48, 49, 50, 51, 52, 53, 54, 55, 56, and 57.
[0186] 20. A lipoparticle comprising an external lipid bilayer; an enveloped retroviral structural protein; and one or more voltage-gated sodium channels, each sodium channel comprising a voltage-gated sodium channel alpha protein (Navα) subunit and one or more voltage-gated sodium channel accessory beta protein (Navβ) subunits, wherein said enveloped retroviral structural protein is an uncleaved gag protein that does not comprise a heterologous tag that binds to the voltage-gated sodium channel, provided that the only viral proteins in the lipoparticle are structural proteins.
[0187] 21. The lipoparticle embodiment 20, wherein the Navα subunit is selected from the group consisting of Nav1.1α, Nav1.2α, Nav1.3α, Nav1.4α, Nav1.5α, Nav1.6α, Nav1.7α, Nav1.8α, and Nav1.9α subunits.
[0188] 22. The lipoparticle embodiment 20, wherein each Navβ subunit is selected from the group consisting of Navβ1, Navβ2, Navβ3, and Navβ4 subunits with the proviso that the polyprotein cannot comprise more than one copy of any one of Navβ1, Navβ2, Navβ3, or Navβ4 subunit.
[0189] 23. A host cell comprising one or more voltage-gated sodium channels integrated into the plasma membrane of the host cell, each voltage-gated sodium channel comprising a voltage-gated sodium channel alpha protein (Navα) subunit and one or more voltage-gated sodium channel accessory beta protein (Navβ) subunits, wherein each of the subunits is separated from adjacent subunits by a cleavage peptide, wherein the host cell further comprises a polynucleotide encoding a polycistronic RNA message comprising an open reading frame (ORF) that encodes a polyprotein comprising a Navα subunit and one or more Navβ subunits, wherein each of the subunits are separated from adjacent subunits by a cleavage peptide.
[0190] 24. The host cell embodiment 23, wherein the Navα subunit is selected from the group consisting of Nav1.1α, Nav1.2α, Nav1.3α, Nav1.4α, Nav1.5α, Nav1.6α, Nav1.7α, Nav1.8α, and Nav1.9α subunits.
[0191] 25. The host cell embodiment 23, wherein each Navβ subunit is selected from the group consisting of Navβ1, Navβ2, Navβ3, and Navβ4 subunits with the proviso that the polyprotein cannot comprise more than one copy of any one of Navβ1, Navβ2, Navβ3, or Navβ4 subunit.
[0192] 26. The host cell embodiment 24, wherein the Nav1.1α, Nav1.2α, Nav1.3α, Nav1.4α, Nav1.5α, Nav1.6α, Nav1.7α, Nav1.8α, or Nav1.9α subunit is encoded by a polynucleotide that is at least 80% identical to a nucleotide sequence set forth in SEQ ID NOs: 7, 9, 11, 13, 15, 17, 19, 21, or 87, respectively.
[0193] 27. The host cell embodiment 25, wherein the Navβ1, Navβ2, Navβ3, or Navβ4 subunit is encoded by a polynucleotide that is at least 80% identical to a nucleotide sequence set forth in SEQ ID NOs: 23, 25, 27, or 89 respectively.
[0194] 28. The host cell embodiment 23, wherein the cleavage peptide is a viral P2A peptide.
[0195] 29. The host cell embodiment 23, wherein the ORF comprises a nucleotide sequence with at least 80% or, in specific embodiments 90%, identity to a nucleotide sequence selected from the group of nucleotide sequences consisting of SEQ ID NOs: 58, 59, 60, 61, 62, 63, 64, 65, 66, 67, 68, 69, 70, 71, 72, 73, 74, 75, 76, 77, 78, 79, 80, and 81.
[0196] 30. The host cell embodiment 23, wherein the polyprotein has 80%, or in specific embodiments 90%, identity to a polyprotein comprising an amino acid sequence selected from the group of amino acid sequences consisting of SEQ ID Nos: 34, 35, 36, 37, 38, 39, 40, 41, 42, 43, 44, 45, 46, 47, 48, 49, 50, 51, 52, 53, 54, 55, 56, and 57.
[0197] 31. The host cell embodiment 23, where the host cell is a mammalian cell.
[0198] 32. The host cell embodiment 31, wherein the mammalian host cell comprises a HEK cells or CHO cells.
[0199] 33. A method for identifying an inhibitor of a voltage-gated sodium channel activity comprising: (a) providing a host cell comprising one or more voltage-gated sodium channels integrated into the plasma membrane of the host cell, each voltage-gated sodium channel comprising a voltage-gated sodium channel alpha protein (Navα) subunit and one or more voltage-gated sodium channel accessory beta protein (Navβ) subunits, wherein the host cell further comprises a polynucleotide encoding a polycistronic RNA message comprising an open reading frame (ORF) that encodes a polyprotein comprising a Navα subunit and one or more Navβ subunits, wherein adjacent subunits are separated by a cleavage peptide; (b) contacting the host cell with a candidate inhibitor and determining whether the voltage-gated sodium channel exhibits lower activity in the presence of the candidate inhibitor relative to activity in the absence of the candidate inhibitor wherein the candidate inhibitor is identified as a voltage-gated sodium channel inhibitor if said lower activity is observed.
[0200] 34. The method embodiment 33 wherein the activity is sodium flux and wherein the sodium flux is measured by patch-clamp assay or fluorometric imaging plate reader assay.
[0201] 35. The method embodiment 33, wherein the inhibitor is a voltage-gated sodium channel binder.
[0202] 36. The method embodiment 35, wherein the voltage-gated sodium channel binder is a human or humanized antibody, a bivalent antibody, a bispecific antibody, a chimeric antibody, or a humanized heavy chain antibody.
[0203] 37. The method embodiment 35, wherein the voltage-gated sodium channel binder is an antibody fragment.
[0204] 38. The method embodiment 35, wherein the antibody fragment is a camelized single domain antibody, an immunoglobulin single variable domain (ISVD), a VHH, a diabody, an scfv, an scfv dimer, a dsfv, a (dsfv)₂, a dsFv-dsfv′, a bispecific ds diabody, an Fv, an Fab, an Fab′, an F(ab′)₂, or a domain antibody, which may be linked to an immunoglobulin constant region, e.g., a kappa or lambda light chain, gamma-1 heavy chain, gamma-2 heavy chain, gamma-3 heavy chain or gamma-4 heavy chain.
[0205] 39. The method embodiment 33, wherein the Navα subunit is selected from the group consisting of Nav1.1α, Nav1.2α, Nav1.3α, Nav1.4α, Nav1.5α, Nav1.6α, Nav1.7α, Nav1.8α. and Nav1.9α subunits.
[0206] 40. The host cell embodiment 33, wherein each Navβ subunit is selected from the group consisting of Navβ1, Navβ2, Navβ3, and Navβ4 subunits.
[0207] 41. The method embodiment 35, wherein the voltage-gated sodium channel binder binds a continuous or discontinuous epitope on a Navα subunit selected from the group consisting of Nav1.1α, Nav1.2α, Nav1.3α, Nav1.4α, Nav1.5α, Nav1.6α, Nav1.7α, Nav1.8α. and Nav1.9α subunits; a continuous or discontinuous epitope on a Navβ subunit selected from the group consisting of Navβ1, Navβ2, and Navβ3 subunits; or, a discontinuous epitope that spans a Nava subunit and a Navβ subunit.
[0208] 42. A voltage-gated sodium channel comprising (a) a human Nav1.1α, Nav1.2α, Nav1.3α, Nav1.4α, Nav1.5α, Nav1.6α, Nav1.7α, Nav1.8α, or Nav1.9α subunit comprising the amino acid sequence upstream of a GP cleavage site in a 2A cleavage peptide at the C-terminus; a human Nav1.1α, Nav1.2α, Nav1.3α, Nav1.4α, Nav1.5α, Nav1.6α, Nav1.7α, Nav1.8α, or Nav1.9α subunit comprising P and amino acid sequence of zero to 40 amino acids downstream of the GP cleavage site at the N-terminus; or a human Nav1.1α, Nav1.2α, Nav1.3α, Nav1.4α, Nav1.5α, Nav1.6α, Nav1.7α, Nav1.8α, or Nav1.9α subunit comprising P and amino acid sequence of zero to 40 amino acids downstream of the GP cleavage site at the N-terminus and comprising the amino acid sequence upstream of a GP cleavage site at its C-terminus; and, (b) at least one Navβ1, Navβ2, Navβ3, or Navβ4 subunit comprising the amino acid sequence upstream of a GP cleavage site at the C-terminus; a human Navβ1, Navβ2, Navβ3, or Navβ4 subunit comprising P and amino acid sequence of zero to 40 amino acids downstream of the GP cleavage site at the N-terminus; or a human Navβ1, Navβ2, Navβ3, or Navβ4 subunit comprising P and amino acid sequence of zero to 40 amino acids downstream of the GP cleavage site at the N-terminus and comprising the amino acid sequence upstream of GP cleavage site at the C-terminus, with the proviso that only one Navα or Navβ subunit comprises solely P and amino acid sequence of zero to 40 amino acids downstream of the GP cleavage site at the N-terminus and only one Navα or Navβ subunit comprises solely the amino acid sequence upstream of GP cleavage site at the C-terminus.

### EXAMPLES

[0209] The following information is provided for more clearly describing the present invention and should not be construed to limit the present invention. Any and all of the compositions and methods described below fall within the scope of the present invention.

### Example 1

[0210] Whole Cell Filter Binding Assay Assessment of Expression of Human Nav1.7α, Naβ1, hNavβ2, hNavβ3 in a Host Cell Expressing a Polynucleotide Encoding a Polyprotein Comprising the Human Nav1.7α, Navβ1, hNavβ2, and hNavβ3 Subunits

[0211] A DNA polynucleotide encoding a polyprotein comprising a human Nav1.7α fused at the C-terminus to a C-terminal tag comprising three tandem FLAG peptides and a 10×Histine peptide (3×FLAG-HIS10; SEQ ID NO: 82) followed by in order the human Navβ1, Navβ2, and Navβ3 in which four subunits are separated from each other by P2A peptides (hNav1.7α(3×FLAG-HIS10)+P2A+hNavβ1+P2A+hNavβ2+P2A+hNavβ3) was constructed. The construct comprises the amino acid sequence set forth in SEQ ID NO: 83.

[0212] The construct was stably integrated into Hek293 cells and a clone comprising the construct was selected, which was designated as Nav1.7-ctag-b1b2b3(PV)_clone11_Hek293, wherein “ctag” refers to the 3×FLAG-HIS10 and b1b2b3(PV) refers to the co-expression of Navβ1, Navβ2 and Navβ3 along with NaV1.7α upon cleavage of the P2A peptide in the polyprotein expressed from the construct. Cells from the clone were subjected to a radioligand—displacement assay. In brief, either 1×10⁵ or 2×10⁵ cells were incubated in the presence of a nM-affinity radiolabeled compound (Nav1.7 inhibitor) +/−excess unlabeled ligand. Following a three hour incubation period, cell:radioligand complexes were purified, microscintillent added to the complexes, and radioactivity measured on a Perkin-Elmer TopCount. Total Binding (TAL) and Non-Specific Binding (NSB) were measured as the amount of total signal in the absence or presence of cold-ligand respectively. Human Nav1.7 ligand binding was calculated as Specific Binding (TAL-NSB) and Signal:Background (TAL/NSB). As compared to a Hek293 cell line expressing high levels of Nav1.7α+P2A+hNavβ1 (Nav1.7b1_Hek293), the newly generated cell line Nav1.7-ctag-b1b2b3(PV)_clone11_Hek293 had a relative increase in Nav1.7 ligand binding of about three- to four-fold.

TABLE 1
Binding of compound to HEK293 cells expressing NaV1.7 sodium channel

| | NaV1.7-ctag- | | |
|---|---|---|---|
| Sample Name | b1b2b3(PV)_clone11_Hek293 | Nav1.7b1_Hek293 | Nav1.7b1_Hek293 |
| total cells/well | 100,000 | 100,000 | 200,000 |
| TAL | 2495 | 805 | 1412 |
| NSB | 177 | 171 | 220 |
| Specific Binding (TAL − NSB) | 2318 | 634 | 1192 |
| Signal:Background (TAL/NSB) | 14.1 | 4.7 | 6.4 |

### Example 2

[0213] Membrane Protein Filter Binding Assay Assessment of Expression of Human Nav1.2α, Navβ1 and hNavβ2 in a Host Cell Expressing a Polynucleotide Encoding a Polyprotein Comprising the Human Nav1.2α, Navβ1, and hNavβ2 Subunits

[0214] DNA encoding the P2A-based construct of hNav1.2α+P2A+hNavβ1+P2A+hNavβ2 was stably integrated into Hek293 cells (designated hNaV1.2_b1b2(PV)) and subject to a radioligand—displacement assay. In brief, 10 μg of membrane protein was incubated in the presence of a nM-affinity radiolabeled compound (NaV1.7 inhibitor) +/−excess unlabeled ligand. Following a three hour incubation, protein:radioligand complexes were purified, microscintillant added, and radioactivity measured on a Perkin-Elmer TopCount. Total Binding (TAL) and Non-Specific Binding (NSB) were measured as the amount of total signal in the absence or presence of unlabeled ligand, respectively. Human Nav1.2 ligand binding was calculated as Specific Binding (TAL-NSB) and Signal:Background (TAL/NSB).

[0215] As compared to three other hNav1.2 expressing cell lines, i.e., VB_Nav1.2b1b2_Hek293 (b1b2=co-expression of Navβ1+Navβ2 through traditional means in which the subunits are individual expressed as separate proteins), Milli_Nav1.2_Hek293 (Millipore; expressing human Nav1.2α and no human Navβ protein subunits) and Dx_NaV1.2 Hek293 (DiscoveRx; expressing human Nav1.2α subunit and no human Navβ subunits), the NaV1.2b1b2 P2A-based Hek293 cell line had a relative increase in NaV1.2α ligand binding of about two-fold.

TABLE 2
Binding of compound to HEK293 cells expressing human NaV1.2 sodium channel

| Sample Name | NaV1.2b1b2(PV)_Hek293 | VB_NaV1.2b1b2_Hek293 | Milli_NaV1.2_Hek293 | Dx_NaV1.2_Hek293 |
|---|---|---|---|---|
| MembraneProtein | 10 | 10 | 10 | 10 |
| (ug/well) | | | | |
| Specific Binding | 326 | 105 | 155 | 161 |
| (TAL − NSB) | | | | |
| Signal:Background | 6 | 3 | 3 | 2.9 |
| (TAL/NSB) | | | | |

### Example 3

[0216] Electrophysiology Measure of a Nav1.7 Sodium Channel in a Host Cell Expressing a Polynucleotide Encoding a Polyprotein Comprising the Human Nav1.7α, Navβ1, hNavβ2, and hNav/β3 Subunits

[0217] DNA encoding the P2A-based construct hNav1.7α+P2A+hNavβ1+P2A+hNavβ2+P2A+hNavβ3 (hNaV1.7_b1b2b3(PV)) was stably integrated into Hek293 cells (hNav1.7α-ctag-b1b2b3(PV)_clone11_Hek293) and subject to QPatch HTX-based electrophysiological recordings of voltage-gated sodium channel activity. In brief, a 48-well tissue culture plate was used to measure sodium current from individual cells. Maximum sodium currents in the presence of 150 mM NaCl were recorded from cells that have been successfully patch-clamped. As shown in Table 3, an increase in median mean current amplitudes were observed in the Nav1.7α-c-tag-b1b2b3(PV)_clone11_Hek293 cell line as compared to the Nav1.7β1_Hek293 cell line. This was consistent with a relative increase in NaV1.7 expression in the hNav1.7α-ctag-b1b2b3(PV)_clone11_Hek293 cell line. The results show that the polyprotein is properly cleaved into Navα and Navβ subunits that can form a functional sodium channel in the host cell membrane.

TABLE 3
Sodium channel activity of Hek293 cells expressing human Nav1.7

| | Median | Mean |
|---|---|---|
| | current | current |
| Cell Line/Condition | (nA) | (nA) |
| hNav1.7β1_Hek293 | 10.4 | 11.0 +/− 6.5 |
| hNav1.7α-ctag-b1b2b3(PV)_clone11_Hek293 | 19 | 18.7 +/− 9.0 |

Lengthy table referenced here
US20240012004A1-20240111-T00001
Please refer to the end of the specification for access instructions.

[0218] The present invention is not to be limited in scope by the specific embodiments described herein. Indeed, the scope of the present invention includes embodiments specifically set forth herein and other embodiments not specifically set forth herein; the embodiments specifically set forth herein are not necessarily intended to be exhaustive. Various modifications of the invention in addition to those described herein will become apparent to those skilled in the art from the foregoing description. Such modifications are intended to fall within the scope of the claims.

[0219] Patents, patent applications, publications, product descriptions, and protocols are cited throughout this application, the disclosures of which are incorporated herein by reference in their entireties for all purposes.

LENGTHY TABLES
The patent application contains a lengthy table section. A copy of the table is available in electronic form from the USPTO web site (https://seqdata.uspto.gov/?pageRequest=docDetail&DocID=US20240012004A1). An electronic copy of the table will also be available from the USPTO upon request and payment of the fee set forth in 37 CFR 1.19(b)(3).

1. A voltage-gated sodium channel expression system comprising a polynucleotide encoding a polycistronic RNA message comprising an open reading frame (ORF) that encodes a polyprotein comprising a voltage-gated sodium channel alpha protein (Navα) subunit and one or more voltage-gated sodium channel accessory beta protein (Navβ) subunits, wherein each of the Navα and Navβ subunits are separated from an adjacent subunit by a cleavage peptide.

2. The voltage-gated sodium channel expression system of claim 1, wherein the Navα subunit is selected from the group consisting of Nav1.1α, Nav1.2α, Nav1.3α, Nav1.4α, Nav1.5α, Nav1.6α, Nav1.7α, Nav1.8α, and Nav1.9α subunits.

3. The voltage-gated sodium channel expression system of claim 1, wherein each Navβ subunit is selected from the group consisting of Navβ1, Navβ2, Navβ3, and Navβ4 subunits with the proviso that the polyprotein cannot comprise more than one copy of any one of Navβ1, Navβ2, Navβ3, or Navβ4 subunit.

4. The voltage-gated sodium channel expression system of claim 2, wherein the Nav1.1α, Nav1.2α, Nav1.3α, Nav1.4α, Nav1.5α, Nav1.6α, Nav1.7α, Nav1.8α, or Nav1.9α subunit is encoded by a polynucleotide that is at least 80% identical to a nucleotide sequence set forth in SEQ ID NOs: 7, 9, 11, 13, 15, 17, 19, 21, or 87, respectively.

5. The voltage-gated sodium channel expression system of claim 3, wherein the Navβ1, Navβ2, Navβ3, or Navβ4 subunit is encoded by a polynucleotide that is at least 80% identical to a nucleotide sequence set forth in SEQ ID NOs: 23, 25, 27, or 89, respectively.

6. The voltage-gated sodium channel expression system of claim 1, wherein the cleavage peptide is a viral P2A peptide.

7-32. (canceled)

33. A method for identifying an inhibitor of a voltage-gated sodium channel activity comprising:
(a) providing a host cell comprising one or more voltage-gated sodium channels integrated into the plasma membrane of the host cell, each voltage-gated sodium channel comprising a voltage-gated sodium channel alpha protein (Navα) subunit and one or more voltage-gated sodium channel accessory beta protein (Navβ) subunits, wherein the host cell further comprises a polynucleotide encoding a polycistronic RNA message comprising an open reading frame (ORF) that encodes a polyprotein comprising a Nava subunit and one or more Navβ subunits, wherein adjacent subunits are separated by a cleavage peptide;
(b) contacting the host cell with a candidate inhibitor and determining whether the voltage-gated sodium channel exhibits lower activity in the presence of the candidate inhibitor relative to activity in the absence of the candidate inhibitor wherein the candidate inhibitor is identified as a voltage-gated sodium channel inhibitor if said lower activity is observed.

34. The method of claim 33 wherein the activity is sodium flux and wherein the sodium flux is measured by patch-clamp assay or fluorometric imaging plate reader assay.

35. The method of claim 33, wherein the inhibitor is a voltage-gated sodium channel binder.

36. The method of claim 35, wherein the voltage-gated sodium channel binder is a human or humanized antibody, a bivalent antibody, a bispecific antibody, a chimeric antibody, or a humanized heavy chain antibody.

37. The method of claim 35, wherein the voltage-gated sodium channel binder is an antibody fragment.

38. The method of claim 35, wherein the antibody fragment is a camelized single domain antibody, an immunoglobulin single variable domain (ISVD), a VHH, a diabody, an scfv, an scfv dimer, a dsfv, a (dsfv)₂, a dsFv-dsfv′, a bispecific ds diabody, an Fv, an Fab, an Fab′, an F(ab′)₂, or a domain antibody, which may be linked to an immunoglobulin constant region, e.g., a kappa or lambda light chain, gamma-1 heavy chain, gamma-2 heavy chain, gamma-3 heavy chain or gamma-4 heavy chain.

39. The method of claim 33, wherein the Navα subunit is selected from the group consisting of Nav1.1α, Nav1.2α, Nav1.3α, Nav1.4α, Nav1.5α, Nav1.6α, Nav1.7α, Nav1.8α. and Nav1.9α subunits.

40. The host cell of claim 33, wherein each Navβ subunit is selected from the group consisting of Navβ1, Navβ2, Navβ3, and Navβ4 subunits.

41. The method of claim 35, wherein the voltage-gated sodium channel binder binds a continuous or discontinuous epitope on a Navα subunit selected from the group consisting of Nav1.1α, Nav1.2α, Nav1.3α, Nav1.4α, Nav1.5α, Nav1.6α, Nav1.7α, Nav1.8α. and Nav1.9α subunits; a continuous or discontinuous epitope on a Navβ subunit selected from the group consisting of Navβ1, Navβ2, and Navβ3 subunits; or, a discontinuous epitope that spans a Navα subunit and a Navβ subunit.

42. A voltage-gated sodium channel comprising
(a) a human Nav1.1α, Nav1.2α, Nav1.3α, Nav1.4α, Nav1.5α, Nav1.6α, Nav1.7α, Nav1.8α, or Nav1.9α subunit comprising the amino acid sequence upstream of a GP cleavage site in a 2A cleavage peptide at the C-terminus; a human Nav1.1α, Nav1.2α, Nav1.3α, Nav1.4α, Nav1.5α, Nav1.6α, Nav1.7α, Nav1.8α, or Nav1.9α subunit comprising P and the amino acid sequence of zero to 40 amino acids downstream of the GP cleavage site at the N-terminus; or a human Nav1.1α, Nav1.2α, Nav1.3α, Nav1.4α, Nav1.5α, Nav1.6α, Nav1.7α, Nav1.8α, or Nav1.9α subunit comprising P and the amino acid sequence of zero to 40 amino acids downstream of the GP cleavage site at the N-terminus and comprising the amino acid sequence upstream of a GP cleavage site at its C-terminus; and,
(b) at least one Navβ1, Navβ2, Navβ3, or Navβ4 subunit comprising the amino acid sequence upstream of a GP cleavage site in a 2A cleavage peptide at the C-terminus; a human Navβ1, Navβ2, Navβ3, or Navβ4 subunit comprising P and amino acid sequence of zero to 40 amino acids downstream of the GP cleavage site at the N-terminus; or a human Navβ1, Navβ2, Navβ3, or Navβ4 subunit comprising P and amino acid sequence of zero to 40 amino acids downstream of the GP cleavage site at the N-terminus and comprising the amino acid sequence upstream of the GP cleavage site at the C-terminus, with the proviso that only one Navα or Navβ subunit comprises solely P and amino acid sequence of zero to 40 amino acids downstream of the GP cleavage site at the N-terminus and only one Navα or Navβ subunit comprises solely the amino acid sequence upstream of GP cleavage site at the C-terminus.

The application's sequence listing, which the Patent Office published only in electronic form, follows.

SEQUENCE LISTING (89 sequences)

SEQ ID NO: 1 - protein, 22 aa, Artificial Sequence
  Viral P2A peptide
GSGATNFSLLKQAGDVEENPGP

SEQ ID NO: 2 - DNA, 66 bp, Artificial Sequence
  Polynucleotide encoding the viral P2A peptide
ggaagcggagctactaacttcagcctgctgaagcaggctggagacgtggaggagaaccctggacct

SEQ ID NO: 3 - DNA, 34 bp, Artificial Sequence
  LoxP recombinase site
ataacttcgtatagcatacattatacgaagttat

SEQ ID NO: 4 - DNA, 34 bp, Artificial Sequence
  FRT recombinase site
gaagttcctattctctagaaagtataggaacttc

SEQ ID NO: 5 - DNA, 48 bp, Artificial Sequence
  FRT recombinase site
gaagttcctattccgaagttcctattctctagaaagtataggaacttc

SEQ ID NO: 6 - protein, 2009 aa, Artificial Sequence
  hNav1.1-alpha subunit
MEQTVLVPPGPDSFNFFTRESLAAIERRIAEEKAKNPKPDKKDDDENGPKPNSDLEAGKNLPFIYGDIPPEMVSEPLEDLDPYYINKKTFIVLNKGKAIFRFSATSALYILTPFNPLRKIAIKILVHSLFSMLIMCTILTNCVFMTMSNPPDWTKNVEYTFTGIYTFESLIKIIARGFCLEDFTFLRDPWNWLDFTVITFAYVTEFVDLGNVSALRTFRVLRALKTISVIPGLKTIVGALIQSVKKLSDVMILTVFCLSVFALIGLQLFMGNLRNKCIQWPPTNASLEEHSIEKNITVNYNGTLINETVFEFDWKSYIQDSRYHYFLEGFLDALLCGNSSDAGQCPEGYMCVKAGRNPNYGYTSFDTFSWAFLSLFRLMTQDFWENLYQLTLRAAGKTYMIFFVLVIFLGSFYLINLILAVVAMAYEEQNQATLEEAEQKEAEFQQMIEQLKKQQEAAQQAATATASEHSREPSAAGRLSDSSSEASKLSSKSAKERRNRRKKRKQKEQSGGEEKDEDEFQKSESEDSIRRKGFRFSIEGNRLTYEKRYSSPHQSLLSIRGSLFSPRRNSRTSLFSFRGRAKDVGSENDFADDEHSTFEDNESRRDSLFVPRRHGERRNSNLSQTSRSSRMLAVFPANGKMHSTVDCNGVVSLVGGPSVPTSPVGQLLPEVIIDKPATDDNGTTTETEMRKRRSSSFHVSMDFLEDPSQRQRAMSIASILTNTVEELEESRQKCPPCWYKFSNIFLIWDCSPYWLKVKHVVNLVVMDPFVDLAITICIVLNTLFMAMEHYPMTDHFNNVLTVGNLVFTGIFTAEMFLKIIAMDPYYYFQEGWNIFDGFIVTLSLVELGLANVEGLSVLRSFRLLRVFKLAKSWPTLNMLIKIIGNSVGALGNLTLVLAIIVFIFAVVGMQLFGKSYKDCVCKIASDCQLPRWHMNDFFHSFLIVFRVLCGEWIETMWDCMEVAGQAMCLTVFMMVMVIGNLVVLNLFLALLLSSFSADNLAATDDDNEMNNLQIAVDRMHKGVAYVKRKIYEFIQQSFIRKQKILDEIKPLDDLNNKKDSCMSNHTAEIGKDLDYLKDVNGTTSGIGTGSSVEKYIIDESDYMSFINNPSLTVTVPIAVGESDFENLNTEDFSSESDLEESKEKLNESSSSSEGSTVDIGAPVEEQPVVEPEETLEPEACFTEGCVQRFKCCQINVEEGRGKQWWNLRRTCFRIVEHNWFETFIVFMILLSSGALAFEDIYIDQRKTIKTMLEYADKVFTYIFILEMLLKWVAYGYQTYFTNAWCWLDFLIVDVSLVSLTANALGYSELGAIKSLRTLRALRPLRALSRFEGMRVVVNALLGAIPSIMNVLLVCLIFWLIFSIMGVNLFAGKFYHCINTTTGDRFDIEDVNNHTDCLKLIERNETARWKNVKVNFDNVGFGYLSLLQVATFKGWMDIMYAAVDSRNVELQPKYEESLYMYLYFVIFIIFGSFFTLNLFIGVIIDNFNQQKKKFGGQDIFMTEEQKKYYNAMKKLGSKKPQKPIPRPGNKFQGMVFDFVTRQVFDISIMILICLNMVTMMVETDDQSEYVTTILSRINLVFIVLFTGECVLKLISLRHYYFTIGWNIFDFVVVILSIVGMFLAELIEKYFVSPTLFRVIRLARIGRILRLIKGAKGIRTLLFALMMSLPALFNIGLLLFLVMFIYAIFGMSNFAYVKREVGIDDMFNFETFGNSMICLFQITTSAGWDGLLAPILNSKPPDCDPNKVNPGSSVKGDCGNPSVGIFFFVSYIIISFLVVVNMYIAVILENFSVATEESAEPLSEDDFEMFYEVWEKFDPDATQFMEFEKLSQFAAALEPPLNLPQPNKLQLIAMDLPMVSGDRIHCLDILFAFTKRVLGESGEMDALRIQMEERFMASNPSKVSYQPITTTLKRKQEEVSAVIIQRAYRRHLLKRTVKQASFTYNKNKIKGGANLLIKEDMIIDRINENSITEKTDLTMSTAACPPSYDRVTKPIVEKHEQEGKDEKAKGK

SEQ ID NO: 7 - DNA, 6027 bp, Artificial Sequence
  Polynucleotide encoding hNav1.1-alpha subunit
atggagcagaccgtgctggtgccccccggccccgacagcttcaacttcttcaccagagagagcctggccgccatcgagagaagaatcgccgaggagaaggccaagaaccccaagcccgacaagaaggacgacgacgagaacggccccaagcccaacagcgacctggaggccggcaagaacctgcccttcatctacggcgacatcccccccgagatggtgagcgagcccctggaggacctggacccctactacatcaacaagaagaccttcatcgtgctgaacaagggcaaggccatcttcagattcagcgccaccagcgccctgtacatcctgacccccttcaaccccctgagaaagatcgccatcaagatcctggtgcacagcctgttcagcatgctgatcatgtgcaccatcctgaccaactgcgtgttcatgaccatgagcaacccccccgactggaccaagaacgtggagtacaccttcaccggcatctacaccttcgagagcctgatcaagatcatcgccagaggcttctgcctggaggacttcaccttcctgagagacccctggaactggctggacttcaccgtgatcaccttcgcctacgtgaccgagttcgtggacctgggcaacgtgagcgccctgagaaccttcagagtgctgagagccctgaagaccatcagcgtgatccccggcctgaagaccatcgtgggcgccctgatccagagcgtgaagaagctgagcgacgtgatgatcctgaccgtgttctgcctgagcgtgttcgccctgatcggcctgcagctgttcatgggcaacctgagaaacaagtgcatccagtggccccccaccaacgccagcctggaggagcacagcatcgagaagaacatcaccgtgaactacaacggcaccctgatcaacgagaccgtgttcgagttcgactggaagagctacatccaggacagcagataccactacttcctggagggcttcctggacgccctgctgtgcggcaacagcagcgacgccggccagtgccccgagggctacatgtgcgtgaaggccggcagaaaccccaactacggctacaccagcttcgacaccttcagctgggccttcctgagcctgttcagactgatgacccaggacttctgggagaacctgtaccagctgaccctgagagccgccggcaagacctacatgatcttcttcgtgctggtgatcttcctgggcagcttctacctgatcaacctgatcctggccgtggtggccatggcctacgaggagcagaaccaggccaccctggaggaggccgagcagaaggaggccgagttccagcagatgatcgagcagctgaagaagcagcaggaggccgcccagcaggccgccaccgccaccgccagcgagcacagcagagagcccagcgccgccggcagactgagcgacagcagcagcgaggccagcaagctgagcagcaagagcgccaaggagagaagaaacagaagaaagaagagaaagcagaaggagcagagcggcggcgaggagaaggacgaggacgagttccagaagagcgagagcgaggacagcatcagaagaaagggcttcagattcagcatcgagggcaacagactgacctacgagaagagatacagcagcccccaccagagcctgctgagcatcagaggcagcctgttcagccccagaagaaacagcagaaccagcctgttcagcttcagaggcagagccaaggacgtgggcagcgagaacgacttcgccgacgacgagcacagcaccttcgaggacaacgagagcagaagagacagcctgttcgtgcccagaagacacggcgagagaagaaacagcaacctgagccagaccagcagaagcagcagaatgctggccgtgttccccgccaacggcaagatgcacagcaccgtggactgcaacggcgtggtgagcctggtgggcggccccagcgtgcccaccagccccgtgggccagctgctgcccgaggtgatcatcgacaagcccgccaccgacgacaacggcaccaccaccgagaccgagatgagaaagagaagaagcagcagcttccacgtgagcatggacttcctggaggaccccagccagagacagagagccatgagcatcgccagcatcctgaccaacaccgtggaggagctggaggagagcagacagaagtgccccccctgctggtacaagttcagcaacatcttcctgatctgggactgcagcccctactggctgaaggtgaagcacgtggtgaacctggtggtgatggaccccttcgtggacctggccatcaccatctgcatcgtgctgaacaccctgttcatggccatggagcactaccccatgaccgaccacttcaacaacgtgctgaccgtgggcaacctggtgttcaccggcatcttcaccgccgagatgttcctgaagatcatcgccatggacccctactactacttccaggagggctggaacatcttcgacggcttcatcgtgaccctgagcctggtggagctgggcctggccaacgtggagggcctgagcgtgctgagaagcttcagactgctgagagtgttcaagctggccaagagctggcccaccctgaacatgctgatcaagatcatcggcaacagcgtgggcgccctgggcaacctgaccctggtgctggccatcatcgtgttcatcttcgccgtggtgggcatgcagctgttcggcaagagctacaaggactgcgtgtgcaagatcgccagcgactgccagctgcccagatggcacatgaacgacttcttccacagcttcctgatcgtgttcagagtgctgtgcggcgagtggatcgagaccatgtgggactgcatggaggtggccggccaggccatgtgcctgaccgtgttcatgatggtgatggtgatcggcaacctggtggtgctgaacctgttcctggccctgctgctgagcagcttcagcgccgacaacctggccgccaccgacgacgacaacgagatgaacaacctgcagatcgccgtggacagaatgcacaagggcgtggcctacgtgaagagaaagatctacgagttcatccagcagagcttcatcagaaagcagaagatcctggacgagatcaagcccctggacgacctgaacaacaagaaggacagctgcatgagcaaccacaccgccgagatcggcaaggacctggactacctgaaggacgtgaacggcaccaccagcggcatcggcaccggcagcagcgtggagaagtacatcatcgacgagagcgactacatgagcttcatcaacaaccccagcctgaccgtgaccgtgcccatcgccgtgggcgagagcgacttcgagaacctgaacaccgaggacttcagcagcgagagcgacctggaggagagcaaggagaagctgaacgagagcagcagcagcagcgagggcagcaccgtggacatcggcgcccccgtggaggagcagcccgtggtggagcccgaggagaccctggagcccgaggcctgcttcaccgagggctgcgtgcagagattcaagtgctgccagatcaacgtggaggagggcagaggcaagcagtggtggaacctgagaagaacctgcttcagaatcgtggagcacaactggttcgagaccttcatcgtgttcatgatcctgctgagcagcggcgccctggccttcgaggacatctacatcgaccagagaaagaccatcaagaccatgctggagtacgccgacaaggtgttcacctacatcttcatcctggagatgctgctgaagtgggtggcctacggctaccagacctacttcaccaacgcctggtgctggctggacttcctgatcgtggacgtgagcctggtgagcctgaccgccaacgccctgggctacagcgagctgggcgccatcaagagcctgagaaccctgagagccctgagacccctgagagccctgagcagattcgagggcatgagagtggtggtgaacgccctgctgggcgccatccccagcatcatgaacgtgctgctggtgtgcctgatcttctggctgatcttcagcatcatgggcgtgaacctgttcgccggcaagttctaccactgcatcaacaccaccaccggcgacagattcgacatcgaggacgtgaacaaccacaccgactgcctgaagctgatcgagagaaacgagaccgccagatggaagaacgtgaaggtgaacttcgacaacgtgggcttcggctacctgagcctgctgcaggtggccaccttcaagggctggatggacatcatgtacgccgccgtggacagcagaaacgtggagctgcagcccaagtacgaggagagcctgtacatgtacctgtacttcgtgatcttcatcatcttcggcagcttcttcaccctgaacctgttcatcggcgtgatcatcgacaacttcaaccagcagaagaagaagttcggcggccaggacatcttcatgaccgaggagcagaagaagtactacaacgccatgaagaagctgggcagcaagaagccccagaagcccatccccagacccggcaacaagttccagggcatggtgttcgacttcgtgaccagacaggtgttcgacatcagcatcatgatcctgatctgcctgaacatggtgaccatgatggtggagaccgacgaccagagcgagtacgtgaccaccatcctgagcagaatcaacctggtgttcatcgtgctgttcaccggcgagtgcgtgctgaagctgatcagcctgagacactactacttcaccatcggctggaacatcttcgacttcgtggtggtgatcctgagcatcgtgggcatgttcctggccgagctgatcgagaagtacttcgtgagccccaccctgttcagagtgatcagactggccagaatcggcagaatcctgagactgatcaagggcgccaagggcatcagaaccctgctgttcgccctgatgatgagcctgcccgccctgttcaacatcggcctgctgctgttcctggtgatgttcatctacgccatcttcggcatgagcaacttcgcctacgtgaagagagaggtgggcatcgacgacatgttcaacttcgagaccttcggcaacagcatgatctgcctgttccagatcaccaccagcgccggctgggacggcctgctggcccccatcctgaacagcaagccccccgactgcgaccccaacaaggtgaaccccggcagcagcgtgaagggcgactgcggcaaccccagcgtgggcatcttcttcttcgtgagctacatcatcatcagcttcctggtggtggtgaacatgtacatcgccgtgatcctggagaacttcagcgtggccaccgaggagagcgccgagcccctgagcgaggacgacttcgagatgttctacgaggtgtgggagaagttcgaccccgacgccacccagttcatggagttcgagaagctgagccagttcgccgccgccctggagccccccctgaacctgccccagcccaacaagctgcagctgatcgccatggacctgcccatggtgagcggcgacagaatccactgcctggacatcctgttcgccttcaccaagagagtgctgggcgagagcggcgagatggacgccctgagaatccagatggaggagagattcatggccagcaaccccagcaaggtgagctaccagcccatcaccaccaccctgaagagaaagcaggaggaggtgagcgccgtgatcatccagagagcctacagaagacacctgctgaagagaaccgtgaagcaggccagcttcacctacaacaagaacaagatcaagggcggcgccaacctgctgatcaaggaggacatgatcatcgacagaatcaacgagaacagcatcaccgagaagaccgacctgaccatgagcaccgccgcctgcccccccagctacgacagagtgaccaagcccatcgtggagaagcacgagcaggagggcaaggacgagaaggccaagggcaag

SEQ ID NO: 8 - protein, 2005 aa, Artificial Sequence
  hNav1.2-alpha subunit
MAQSVLVPPGPDSFRFFTRESLAAIEQRIAEEKAKRPKQERKDEDDENGPKPNSDLEAGKSLPFIYGDIPPEMVSVPLEDLDPYYINKKTFIVLNKGKAISRFSATPALYILTPFNPIRKLAIKILVHSLFNMLIMCTILTNCVFMTMSNPPDWTKNVEYTFTGIYTFESLIKILARGFCLEDFTFLRDPWNWLDFTVITFAYVTEFVDLGNVSALRTFRVLRALKTISVIPGLKTIVGALIQSVKKLSDVMILTVFCLSVFALIGLQLFMGNLRNKCLQWPPDNSSFEINITSFFNNSLDGNGTTFNRTVSIFNWDEYIEDKSHFYFLEGQNDALLCGNSSDAGQCPEGYICVKAGRNPNYGYTSFDTFSWAFLSLFRLMTQDFWENLYQLTLRAAGKTYMIFFVLVIFLGSFYLINLILAVVAMAYEEQNQATLEEAEQKEAEFQQMLEQLKKQQEEAQAAAAAASAESRDFSGAGGIGVFSESSSVASKLSSKSEKELKNRRKKKKQKEQSGEEEKNDRVRKSESEDSIRRKGFRFSLEGSRLTYEKRFSSPHQSLLSIRGSLFSPRRNSRASLFSFRGRAKDIGSENDFADDEHSTFEDNDSRRDSLFVPHRHGERRHSNVSQASRASRVLPILPMNGKMHSAVDCNGVVSLVGGPSTLTSAGQLLPEGTTTETEIRKRRSSSYHVSMDLLEDPTSRQRAMSIASILTNTMEELEESRQKCPPCWYKFANMCLIWDCCKPWLKVKHLVNLVVMDPFVDLAITICIVLNTLFMAMEHYPMTEQFSSVLSVGNLVFTGIFTAEMFLKIIAMDPYYYFQEGWNIFDGFIVSLSLMELGLANVEGLSVLRSFRLLRVFKLAKSWPTLNMLIKIIGNSVGALGNLTLVLAIIVFIFAVVGMQLFGKSYKECVCKISNDCELPRWHMHDFFHSFLIVFRVLCGEWIETMWDCMEVAGQTMCLTVFMMVMVIGNLVVLNLFLALLLSSFSSDNLAATDDDNEMNNLQIAVGRMQKGIDFVKRKIREFIQKAFVRKQKALDEIKPLEDLNNKKDSCISNHTTIEIGKDLNYLKDGNGTTSGIGSSVEKYVVDESDYMSFINNPSLTVTVPIAVGESDFENLNTEEFSSESDMEESKEKLNATSSSEGSTVDIGAPAEGEQPEVEPEESLEPEACFTEDCVRKFKCCQISIEEGKGKLWWNLRKTCYKIVEHNWFETFIVFMILLSSGALAFEDIYIEQRKTIKTMLEYADKVFTYIFILEMLLKWVAYGFQVYFTNAWCWLDFLIVDVSLVSLTANALGYSELGAIKSLRTLRALRPLRALSRFEGMRVVVNALLGAIPSIMNVLLVCLIFWLIFSIMGVNLFAGKFYHCINYTTGEMFDVSVVNNYSECKALIESNQTARWKNVKVNFDNVGLGYLSLLQVATFKGWMDIMYAAVDSRNVELQPKYEDNLYMYLYFVIFIIFGSFFTLNLFIGVIIDNFNQQKKKFGGQDIFMTEEQKKYYNAMKKLGSKKPQKPIPRPANKFQGMVFDFVTKQVFDISIMILICLNMVTMMVETDDQSQEMTNILYWINLVFIVLFTGECVLKLISLRYYYFTIGWNIFDFVVVILSIVGMFLAELIEKYFVSPTLFRVIRLARIGRILRLIKGAKGIRTLLFALMMSLPALFNIGLLLFLVMFIYAIFGMSNFAYVKREVGIDDMFNFETFGNSMICLFQITTSAGWDGLLAPILNSGPPDCDPDKDHPGSSVKGDCGNPSVGIFFFVSYIIISFLVVVNMYIAVILENFSVATEESAEPLSEDDFEMFYEVWEKFDPDATQFIEFAKLSDFADALDPPLLIAKPNKVQLIAMDLPMVSGDRIHCLDILFAFTKRVLGESGEMDALRIQMEERFMASNPSKVSYEPITTTLKRKQEEVSAIIIQRAYRRYLLKQKVKKVSSIYKKDKGKECDGTPIKEDTLIDKLNENSTPEKTDMTPSTTSPPSYDSVTKPEKEKFEKDKSEKEDKGKDIRESKK

SEQ ID NO: 9 - DNA, 6015 bp, Artificial Sequence
  Polynucleotide encoding hNav1.2-alpha subunit
atggcacagtcagtgctggtaccgccaggacctgacagcttccgcttctttaccagggaatcccttgctgctattgaacaacgcattgcagaagagaaagctaagagacccaaacaggaacgcaaggatgaggatgatgaaaatggcccaaagccaaacagtgacttggaagcaggaaaatctcttccatttatttatggagacattcctccagagatggtgtcagtgcccctggaggatctggacccctactatatcaataagaaaacgtttatagtattgaataaagggaaagcaatctctcgattcagtgccacccctgccctttacattttaactcccttcaaccctattagaaaattagctattaagattttggtacattctttattcaatatgctcattatgtgcacgattcttaccaactgtgtatttatgaccatgagtaaccctccagactggacaaagaatgtggagtatacctttacaggaatttatacttttgaatcacttattaaaatacttgcaaggggcttttgtttagaagatttcacatttttacgggatccatggaattggttggatttcacagtcattacttttgcatatgtgacagagtttgtggacctgggcaatgtctcagcgttgagaacattcagagttctccgagcattgaaaacaatttcagtcattccaggcctgaagaccattgtgggggccctgatccagtcagtgaagaagctttctgatgtcatgatcttgactgtgttctgtctaagcgtgtttgcgctaataggattgcagttgttcatgggcaacctacgaaataaatgtttgcaatggcctccagataattcttcctttgaaataaatatcacttccttctttaacaattcattggatgggaatggtactactttcaataggacagtgagcatatttaactgggatgaatatattgaggataaaagtcacttttattttttagaggggcaaaatgatgctctgctttgtggcaacagctcagatgcaggccagtgtcctgaaggatacatctgtgtgaaggctggtagaaaccccaactatggctacacgagctttgacacctttagttgggcctttttgtccttatttcgtctcatgactcaagacttctgggaaaacctttatcaactgacactacgtgctgctgggaaaacgtacatgatattttttgtgctggtcattttcttgggctcattctatctaataaatttgatcttggctgtggtggccatggcctatgaggaacagaatcaggccacattggaagaggctgaacagaaggaagctgaatttcagcagatgctcgaacagttgaaaaagcaacaagaagaagctcaggcggcagctgcagccgcatctgctgaatcaagagacttcagtggtgctggtgggataggagttttttcagagagttcttcagtagcatctaagttgagctccaaaagtgaaaaagagctgaaaaacagaagaaagaaaaagaaacagaaagaacagtctggagaagaagagaaaaatgacagagtccgaaaatcggaatctgaagacagcataagaagaaaaggtttccgtttttccttggaaggaagtaggctgacatatgaaaagagattttcttctccacaccagtccttactgagcatccgtggctcccttttctctccaagacgcaacagtagggcgagccttttcagcttcagaggtcgagcaaaggacattggctctgagaatgactttgctgatgatgagcacagcacctttgaggacaatgacagccgaagagactctctgttcgtgccgcacagacatggagaacggcgccacagcaatgtcagccaggccagccgtgcctccagggtgctccccatcctgcccatgaatgggaagatgcatagcgctgtggactgcaatggtgtggtctccctggtcgggggcccttctaccctcacatctgctgggcagctcctaccagagggcacaactactgaaacagaaataagaaagagacggtccagttcttatcatgtttccatggatttattggaagatcctacatcaaggcaaagagcaatgagtatagccagtattttgaccaacaccatggaagaacttgaagaatccagacagaaatgcccaccatgctggtataaatttgctaatatgtgtttgatttgggactgttgtaaaccatggttaaaggtgaaacaccttgtcaacctggttgtaatggacccatttgttgacctggccatcaccatctgcattgtcttaaatacactcttcatggctatggagcactatcccatgacggagcagttcagcagtgtactgtctgttggaaacctggtcttcacagggatcttcacagcagaaatgtttctcaagataattgccatggatccatattattactttcaagaaggctggaatatttttgatggttttattgtgagccttagtttaatggaacttggtttggcaaatgtggaaggattgtcagttctccgatcattccggctgctccgagttttcaagttggcaaaatcttggccaactctaaatatgctaattaagatcattggcaattctgtgggggctctaggaaacctcaccttggtattggccatcatcgtcttcatttttgctgtggtcggcatgcagctctttggtaagagctacaaagaatgtgtctgcaagatttccaatgattgtgaactcccacgctggcacatgcatgactttttccactccttcctgatcgtgttccgcgtgctgtgtggagagtggatagagaccatgtgggactgtatggaggtcgctggccaaaccatgtgccttactgtcttcatgatggtcatggtgattggaaatctagtggttctgaacctcttcttggccttgcttttgagttccttcagttctgacaatcttgctgccactgatgatgataacgaaatgaataatctccagattgctgtgggaaggatgcagaaaggaatcgattttgttaaaagaaaaatacgtgaatttattcagaaagcctttgttaggaagcagaaagctttagatgaaattaaaccgcttgaagatctaaataataaaaaagacagctgtatttccaaccataccaccatagaaataggcaaagacctcaattatctcaaagacggaaatggaactactagtggcataggcagcagtgtagaaaaatatgtcgtggatgaaagtgattacatgtcatttataaacaaccctagcctcactgtgacagtaccaattgctgttggagaatctgactttgaaaatttaaatactgaagaattcagcagcgagtcagatatggaggaaagcaaagagaagctaaatgcaactagttcatctgaaggcagcacggttgatattggagctcccgccgagggagaacagcctgaggttgaacctgaggaatcccttgaacctgaagcctgttttacagaagactgtgtacggaagttcaagtgttgtcagataagcatagaagaaggcaaagggaaactctggtggaatttgaggaaaacatgctataagatagtggagcacaattggttcgaaaccttcattgtcttcatgattctgctgagcagtggggctctggcctttgaagatatatacattgagcagcgaaaaaccattaagaccatgttagaatatgctgacaaggttttcacttacatattcattctggaaatgctgctaaagtgggttgcatatggttttcaagtgtattttaccaatgcctggtgctggctagacttcctgattgttgatgtctcactggttagcttaactgcaaatgccttgggttactcagaacttggtgccatcaaatccctcagaacactaagagctctgaggccactgagagctttgtcccggtttgaaggaatgagggttgttgtaaatgctcttttaggagccattccatctatcatgaatgtacttctggtttgtctgatcttttggctaatattcagtatcatgggagtgaatctctttgctggcaagttttaccattgtattaattacaccactggagagatgtttgatgtaagcgtggtcaacaactacagtgagtgcaaagctctcattgagagcaatcaaactgccaggtggaaaaatgtgaaagtaaactttgataacgtaggacttggatatctgtctctacttcaagtagccacgtttaagggatggatggatattatgtatgcagctgttgattcacgaaatgtagaattacaacccaagtatgaagacaacctgtacatgtatctttattttgtcatctttattatttttggttcattctttaccttgaatcttttcattggtgtcatcatagataacttcaaccaacagaaaaagaagtttggaggtcaagacatttttatgacagaagaacagaagaaatactacaatgcaatgaaaaaactgggttcaaagaaaccacaaaaacccatacctcgacctgctaacaaattccaaggaatggtctttgattttgtaaccaaacaagtctttgatatcagcatcatgatcctcatctgccttaacatggtcaccatgatggtggaaaccgatgaccagagtcaagaaatgacaaacattctgtactggattaatctggtgtttattgttctgttcactggagaatgtgtgctgaaactgatctctcttcgttactactatttcactattggatggaatatttttgattttgtggtggtcattctctccattgtaggaatgtttctggctgaactgatagaaaagtattttgtgtcccctaccctgttccgagtgatccgtcttgccaggattggccgaatcctacgtctgatcaaaggagcaaaggggatccgcacgctgctctttgctttgatgatgtcccttcctgcgttgtttaacatcggcctccttcttttcctggtcatgttcatctacgccatctttgggatgtccaattttgcctatgttaagagggaagttgggatcgatgacatgttcaactttgagacctttggcaacagcatgatctgcctgttccaaattacaacctctgctggctgggatggattgctagcacctattcttaatagtggacctccagactgtgaccctgacaaagatcaccctggaagctcagttaaaggagactgtgggaacccatctgttgggattttcttttttgtcagttacatcatcatatccttcctggttgtggtgaacatgtacatcgcggtcatcctggagaacttcagtgttgctactgaagaaagtgcagagcctctgagtgaggatgactttgagatgttctatgaggtttgggagaagtttgatcccgatgcgacccagtttatagagtttgccaaactttctgattttgcagatgccctggatcctcctcttctcatagcaaaacccaacaaagtccagctcattgccatggatctgcccatggtgagtggtgaccggatccactgtcttgacatcttatttgcttttacaaagcgtgttttgggtgagagtggagagatggatgcccttcgaatacagatggaagagcgattcatggcatcaaacccctccaaagtctcttatgagcccattacgaccacgttgaaacgcaaacaagaggaggtgtctgctattattatccagagggcttacagacgctacctcttgaagcaaaaagttaaaaaggtatcaagtatatacaagaaagacaaaggcaaagaatgtgatggaacacccatcaaagaagatactctcattgataaactgaatgagaattcaactccagagaaaaccgatatgacgccttccaccacgtctccaccctcgtatgatagtgtgaccaaaccagaaaaagaaaaatttgaaaaagacaaatcagaaaaggaagacaaagggaaagatatcagggaaagtaaaaag

SEQ ID NO: 10 - protein, 2000 aa, Artificial Sequence
  hNav1.3-alpha subunit
MAQALLVPPGPESFRLFTRESLAAIEKRAAEEKAKKPKKEQDNDDENKPKPNSDLEAGKNLPFIYGDIPPEMVSEPLEDLDPYYINKKTFIVMNKGKAIFRFSATSALYILTPLNPVRKIAIKILVHSLFSMLIMCTILTNCVFMTLSNPPDWTKNVEYTFTGIYTFESLIKILARGFCLEDFTFLRDPWNWLDFSVIVMAYVTEFVSLGNVSALRTFRVLRALKTISVIPGLKTIVGALIQSVKKLSDVMILTVFCLSVFALIGLQLFMGNLRNKCLQWPPSDSAFETNTTSYFNGTMDSNGTFVNVTMSTFNWKDYIGDDSHFYVLDGQKDPLLCGNGSDAGQCPEGYICVKAGRNPNYGYTSFDTFSWAFLSLFRLMTQDYWENLYQLTLRAAGKTYMIFFVLVIFLGSFYLVNLILAVVAMAYEEQNQATLEEAEQKEAEFQQMLEQLKKQQEEAQAVAAASAASRDFSGIGGLGELLESSSEASKLSSKSAKEWRNRRKKRRQREHLEGNNKGERDSFPKSESEDSVKRSSFLFSMDGNRLTSDKKFCSPHQSLLSIRGSLFSPRRNSKTSIFSFRGRAKDVGSENDFADDEHSTFEDSESRRDSLFVPHRHGERRNSNVSQASMSSRMVPGLPANGKMHSTVDCNGVVSLVGGPSALTSPTGQLPPEGTTTETEVRKRRLSSYQISMEMLEDSSGRQRAVSIASILTNTMEELEESRQKCPPCWYRFANVFLIWDCCDAWLKVKHLVNLIVMDPFVDLAITICIVLNTLFMAMEHYPMTEQFSSVLTVGNLVFTGIFTAEMVLKIIAMDPYYYFQEGWNIFDGIIVSLSLMELGLSNVEGLSVLRSFRLLRVFKLAKSWPTLNMLIKIIGNSVGALGNLTLVLAIIVFIFAVVGMQLFGKSYKECVCKINDDCTLPRWHMNDFFHSFLIVFRVLCGEWIETMWDCMEVAGQTMCLIVFMLVMVIGNLVVLNLFLALLLSSFSSDNLAATDDDNEMNNLQIAVGRMQKGIDYVKNKMRECFQKAFFRKPKVIEIHEGNKIDSCMSNNTGIEISKELNYLRDGNGTTSGVGTGSSVEKYVIDENDYMSFINNPSLTVTVPIAVGESDFENLNTEEFSSESELEESKEKLNATSSSEGSTVDVVLPREGEQAETEPEEDLKPEACFTEGCIKKFPFCQVSTEEGKGKIWWNLRKTCYSIVEHNWFETFIVFMILLSSGALAFEDIYIEQRKTIKTMLEYADKVFTYIFILEMLLKWVAYGFQTYFTNAWCWLDFLIVDVSLVSLVANALGYSELGAIKSLRTLRALRPLRALSRFEGMRVVVNALVGAIPSIMNVLLVCLIFWLIFSIMGVNLFAGKFYHCVNMTTGNMFDISDVNNLSDCQALGKQARWKNVKVNFDNVGAGYLALLQVATFKGWMDIMYAAVDSRDVKLQPVYEENLYMYLYFVIFIIFGSFFTLNLFIGVIIDNFNQQKKKFGGQDIFMTEEQKKYYNAMKKLGSKKPQKPIPRPANKFQGMVFDFVTRQVFDISIMILICLNMVTMMVETDDQGKYMTLVLSRINLVFIVLFTGEFVLKLVSLRHYYFTIGWNIFDFVVVILSIVGMFLAEMIEKYFVSPTLFRVIRLARIGRILRLIKGAKGIRTLLFALMMSLPALFNIGLLLFLVMFIYAIFGMSNFAYVKKEAGIDDMFNFETFGNSMICLFQITTSAGWDGLLAPILNSAPPDCDPDTIHPGSSVKGDCGNPSVGIFFFVSYIIISFLVVVNMYIAVILENFSVATEESAEPLSEDDFEMFYEVWEKFDPDATQFIEFSKLSDFAAALDPPLLIAKPNKVQLIAMDLPMVSGDRIHCLDILFAFTKRVLGESGEMDALRIQMEDRFMASNPSKVSYEPITTTLKRKQEEVSAAIIQRNFRCYLLKQRLKNISSNYNKEAIKGRIDLPIKQDMIIDKLNGNSTPEKTDGSSSTTSPPSYDSVTKPDKEKFEKDKPEKESKGKEVRENQK

SEQ ID NO: 11 - DNA, 6000 bp, Artificial Sequence
  Polynucleotide encoding hNav1.3-alpha subunit
atggcccaggccctgctggtgccccccggccccgagagcttcagactgttcaccagagagagcctggccgccatcgagaagagagccgccgaggagaaggccaagaagcccaagaaggagcaggacaacgacgacgagaacaagcccaagcccaacagcgacctggaggccggcaagaacctgcccttcatctacggcgacatcccccccgagatggtgagcgagcccctggaggacctggacccctactacatcaacaagaagaccttcatcgtgatgaacaagggcaaggccatcttcagattcagcgccaccagcgccctgtacatcctgacccccctgaaccccgtgagaaagatcgccatcaagatcctggtgcacagcctgttcagcatgctgatcatgtgcaccatcctgaccaactgcgtgttcatgaccctgagcaacccccccgactggaccaagaacgtggagtacaccttcaccggcatctacaccttcgagagcctgatcaagatcctggccagaggcttctgcctggaggacttcaccttcctgagagacccctggaactggctggacttcagcgtgatcgtgatggcctacgtgaccgagttcgtgagcctgggcaacgtgagcgccctgagaaccttcagagtgctgagagccctgaagaccatcagcgtgatccccggcctgaagaccatcgtgggcgccctgatccagagcgtgaagaagctgagcgacgtgatgatcctgaccgtgttctgcctgagcgtgttcgccctgatcggcctgcagctgttcatgggcaacctgagaaacaagtgcctgcagtggccccccagcgacagcgccttcgagaccaacaccaccagctacttcaacggcaccatggacagcaacggcaccttcgtgaacgtgaccatgagcaccttcaactggaaggactacatcggcgacgacagccacttctacgtgctggacggccagaaggaccccctgctgtgcggcaacggcagcgacgccggccagtgccccgagggctacatctgcgtgaaggccggcagaaaccccaactacggctacaccagcttcgacaccttcagctgggccttcctgagcctgttcagactgatgacccaggactactgggagaacctgtaccagctgaccctgagagccgccggcaagacctacatgatcttcttcgtgctggtgatcttcctgggcagcttctacctggtgaacctgatcctggccgtggtggccatggcctacgaggagcagaaccaggccaccctggaggaggccgagcagaaggaggccgagttccagcagatgctggagcagctgaagaagcagcaggaggaggcccaggccgtggccgccgccagcgccgccagcagagacttcagcggcatcggcggcctgggcgagctgctggagagcagcagcgaggccagcaagctgagcagcaagagcgccaaggagtggagaaacagaagaaagaagagaagacagagagagcacctggagggcaacaacaagggcgagagagacagcttccccaagagcgagagcgaggacagcgtgaagagaagcagcttcctgttcagcatggacggcaacagactgaccagcgacaagaagttctgcagcccccaccagagcctgctgagcatcagaggcagcctgttcagccccagaagaaacagcaagaccagcatcttcagcttcagaggcagagccaaggacgtgggcagcgagaacgacttcgccgacgacgagcacagcaccttcgaggacagcgagagcagaagagacagcctgttcgtgccccacagacacggcgagagaagaaacagcaacgtgagccaggccagcatgagcagcagaatggtgcccggcctgcccgccaacggcaagatgcacagcaccgtggactgcaacggcgtggtgagcctggtgggcggccccagcgccctgaccagccccaccggccagctgccccccgagggcaccaccaccgagaccgaggtgagaaagagaagactgagcagctaccagatcagcatggagatgctggaggacagcagcggcagacagagagccgtgagcatcgccagcatcctgaccaacaccatggaggagctggaggagagcagacagaagtgccccccctgctggtacagattcgccaacgtgttcctgatctgggactgctgcgacgcctggctgaaggtgaagcacctggtgaacctgatcgtgatggaccccttcgtggacctggccatcaccatctgcatcgtgctgaacaccctgttcatggccatggagcactaccccatgaccgagcagttcagcagcgtgctgaccgtgggcaacctggtgttcaccggcatcttcaccgccgagatggtgctgaagatcatcgccatggacccctactactacttccaggagggctggaacatcttcgacggcatcatcgtgagcctgagcctgatggagctgggcctgagcaacgtggagggcctgagcgtgctgagaagcttcagactgctgagagtgttcaagctggccaagagctggcccaccctgaacatgctgatcaagatcatcggcaacagcgtgggcgccctgggcaacctgaccctggtgctggccatcatcgtgttcatcttcgccgtggtgggcatgcagctgttcggcaagagctacaaggagtgcgtgtgcaagatcaacgacgactgcaccctgcccagatggcacatgaacgacttcttccacagcttcctgatcgtgttcagagtgctgtgcggcgagtggatcgagaccatgtgggactgcatggaggtggccggccagaccatgtgcctgatcgtgttcatgctggtgatggtgatcggcaacctggtggtgctgaacctgttcctggccctgctgctgagcagcttcagcagcgacaacctggccgccaccgacgacgacaacgagatgaacaacctgcagatcgccgtgggcagaatgcagaagggcatcgactacgtgaagaacaagatgagagagtgcttccagaaggccttcttcagaaagcccaaggtgatcgagatccacgagggcaacaagatcgacagctgcatgagcaacaacaccggcatcgagatcagcaaggagctgaactacctgagagacggcaacggcaccaccagcggcgtgggcaccggcagcagcgtggagaagtacgtgatcgacgagaacgactacatgagcttcatcaacaaccccagcctgaccgtgaccgtgcccatcgccgtgggcgagagcgacttcgagaacctgaacaccgaggagttcagcagcgagagcgagctggaggagagcaaggagaagctgaacgccaccagcagcagcgagggcagcaccgtggacgtggtgctgcccagagagggcgagcaggccgagaccgagcccgaggaggacctgaagcccgaggcctgcttcaccgagggctgcatcaagaagttccccttctgccaggtgagcaccgaggagggcaagggcaagatctggtggaacctgagaaagacctgctacagcatcgtggagcacaactggttcgagaccttcatcgtgttcatgatcctgctgagcagcggcgccctggccttcgaggacatctacatcgagcagagaaagaccatcaagaccatgctggagtacgccgacaaggtgttcacctacatcttcatcctggagatgctgctgaagtgggtggcctacggcttccagacctacttcaccaacgcctggtgctggctggacttcctgatcgtggacgtgagcctggtgagcctggtggccaacgccctgggctacagcgagctgggcgccatcaagagcctgagaaccctgagagccctgagacccctgagagccctgagcagattcgagggcatgagagtggtggtgaacgccctggtgggcgccatccccagcatcatgaacgtgctgctggtgtgcctgatcttctggctgatcttcagcatcatgggcgtgaacctgttcgccggcaagttctaccactgcgtgaacatgaccaccggcaacatgttcgacatcagcgacgtgaacaacctgagcgactgccaggccctgggcaagcaggccagatggaagaacgtgaaggtgaacttcgacaacgtgggcgccggctacctggccctgctgcaggtggccaccttcaagggctggatggacatcatgtacgccgccgtggacagcagagacgtgaagctgcagcccgtgtacgaggagaacctgtacatgtacctgtacttcgtgatcttcatcatcttcggcagcttcttcaccctgaacctgttcatcggcgtgatcatcgacaacttcaaccagcagaagaagaagttcggcggccaggacatcttcatgaccgaggagcagaagaagtactacaacgccatgaagaagctgggcagcaagaagccccagaagcccatccccagacccgccaacaagttccagggcatggtgttcgacttcgtgaccagacaggtgttcgacatcagcatcatgatcctgatctgcctgaacatggtgaccatgatggtggagaccgacgaccagggcaagtacatgaccctggtgctgagcagaatcaacctggtgttcatcgtgctgttcaccggcgagttcgtgctgaagctggtgagcctgagacactactacttcaccatcggctggaacatcttcgacttcgtggtggtgatcctgagcatcgtgggcatgttcctggccgagatgatcgagaagtacttcgtgagccccaccctgttcagagtgatcagactggccagaatcggcagaatcctgagactgatcaagggcgccaagggcatcagaaccctgctgttcgccctgatgatgagcctgcccgccctgttcaacatcggcctgctgctgttcctggtgatgttcatctacgccatcttcggcatgagcaacttcgcctacgtgaagaaggaggccggcatcgacgacatgttcaacttcgagaccttcggcaacagcatgatctgcctgttccagatcaccaccagcgccggctgggacggcctgctggcccccatcctgaacagcgccccccccgactgcgaccccgacaccatccaccccggcagcagcgtgaagggcgactgcggcaaccccagcgtgggcatcttcttcttcgtgagctacatcatcatcagcttcctggtggtggtgaacatgtacatcgccgtgatcctggagaacttcagcgtggccaccgaggagagcgccgagcccctgagcgaggacgacttcgagatgttctacgaggtgtgggagaagttcgaccccgacgccacccagttcatcgagttcagcaagctgagcgacttcgccgccgccctggacccccccctgctgatcgccaagcccaacaaggtgcagctgatcgccatggacctgcccatggtgagcggcgacagaatccactgcctggacatcctgttcgccttcaccaagagagtgctgggcgagagcggcgagatggacgccctgagaatccagatggaggacagattcatggccagcaaccccagcaaggtgagctacgagcccatcaccaccaccctgaagagaaagcaggaggaggtgagcgccgccatcatccagagaaacttcagatgctacctgctgaagcagagactgaagaacatcagcagcaactacaacaaggaggccatcaagggcagaatcgacctgcccatcaagcaggacatgatcatcgacaagctgaacggcaacagcacccccgagaagaccgacggcagcagcagcaccaccagcccccccagctacgacagcgtgaccaagcccgacaaggagaagttcgagaaggacaagcccgagaaggagagcaagggcaaggaggtgagagagaaccagaag

SEQ ID NO: 12 - protein, 1836 aa, Artificial Sequence
  hNav1.4-alpha subunit
MARPSLCTLVPLGPECLRPFTRESLAAIEQRAVEEEARLQRNKQMEIEEPERKPRSDLEAGKNLPMIYGDPPPEVIGIPLEDLDPYYSNKKTFIVLNKGKAIFRFSATPALYLLSPFSVVRRGAIKVLIHALFSMFIMITILTNCVFMTMSDPPPWSKNVEYTFTGIYTFESLIKILARGFCVDDFTFLRDPWNWLDFSVIMMAYLTEFVDLGNISALRTFRVLRALKTITVIPGLKTIVGALIQSVKKLSDVMILTVFCLSVFALVGLQLFMGNLRQKCVRWPPPFNDTNTTWYSNDTWYGNDTWYGNEMWYGNDSWYANDTWNSHASWATNDTFDWDAYISDEGNFYFLEGSNDALLCGNSSDAGHCPEGYECIKTGRNPNYGYTSYDTFSWAFLALFRLMTQDYWENLFQLTLRAAGKTYMIFFVVIIFLGSFYLINLILAVVAMAYAEQNEATLAEDKEKEEEFQQMLEKFKKHQEELEKAKAAQALEGGEADGDPAHGKDCNGSLDTSQGEKGAPRQSSSGDSGISDAMEELEEAHQKCPPWWYKCAHKVLIWNCCAPWLKFKNIIHLIVMDPFVDLGITICIVLNTLFMAMEHYPMTEHFDNVLTVGNLVFTGIFTAEMVLKLIAMDPYEYFQQGWNIFDSIIVTLSLVELGLANVQGLSVLRSFRLLRVFKLAKSWPTLNMLIKIIGNSVGALGNLTLVLAIIVFIFAVVGMQLFGKSYKECVCKIALDCNLPRWHMHDFFHSFLIVFRILCGEWIETMWDCMEVAGQAMCLTVFLMVMVIGNLVVLNLFLALLLSSFSADSLAASDEDGEMNNLQIAIGRIKLGIGFAKAFLLGLLHGKILSPKDIMLSLGEADGAGEAGEAGETAPEDEKKEPPEEDLKKDNHILNHMGLADGPPSSLELDHLNFINNPYLTIQVPIASEESDLEMPTEEETDTFSEPEDSKKPPQPLYDGNSSVCSTADYKPPEEDPEEQAEENPEGEQPEECFTEACVQRWPCLYVDISQGRGKKWWTLRRACFKIVEHNWFETFIVFMILLSSGALAFEDIYIEQRRVIRTILEYADKVFTYIFIMEMLLKWVAYGFKVYFTNAWCWLDFLIVDVSIISLVANWLGYSELGPIKSLRTLRALRPLRALSRFEGMRVVVNALLGAIPSIMNVLLVCLIFWLIFSIMGVNLFAGKFYYCINTTTSERFDISEVNNKSECESLMHTGQVRWLNVKVNYDNVGLGYLSLLQVATFKGWMDIMYAAVDSREKEEQPQYEVNLYMYLYFVIFIIFGSFFTLNLFIGVIIDNFNQQKKKLGGKDIFMTEEQKKYYNAMKKLGSKKPQKPIPRPQNKIQGMVYDLVTKQAFDITIMILICLNMVTMMVETDNQSQLKVDILYNINMIFIIIFTGECVLKMLALRQYYFTVGWNIFDFVVVILSIVGLALSDLIQKYFVSPTLFRVIRLARIGRVLRLIRGAKGIRTLLFALMMSLPALFNIGLLLFLVMFIYSIFGMSNFAYVKKESGIDDMFNFETFGNSIICLFEITTSAGWDGLLNPILNSGPPDCDPNLENPGTSVKGDCGNPSIGICFFCSYIIISFLIVVNMYIAIILENFNVATEESSEPLGEDDFEMFYETWEKFDPDATQFIAYSRLSDFVDTLQEPLRIAKPNKIKLITLDLPMVPGDKIHCLDILFALTKEVLGDSGEMDALKQTMEEKFMAANPSKVSYEPITTTLKRKHEEVCAIKIQRAYRRHLLQRSMKQASYMYRHSHDGSGDDAPEKEGLLANTMSKMYGHENGNSSSPSPEEKGEAGDAGPTMGLMPISPSDTAWPPAPPPGQTVRPGVKESLV

SEQ ID NO: 13 - DNA, 5508 bp, Artificial Sequence
  Polynucleotide encoding hNav1.4-alpha subunit
atggccagacccagcctgtgcaccctggtgcccctgggccccgagtgcctgagacccttcaccagagagagcctggccgccatcgagcagagagccgtggaggaggaggccagactgcagagaaacaagcagatggagatcgaggagcccgagagaaagcccagaagcgacctggaggccggcaagaacctgcccatgatctacggcgaccccccccccgaggtgatcggcatccccctggaggacctggacccctactacagcaacaagaagaccttcatcgtgctgaacaagggcaaggccatcttcagattcagcgccacccccgccctgtacctgctgagccccttcagcgtggtgagaagaggcgccatcaaggtgctgatccacgccctgttcagcatgttcatcatgatcaccatcctgaccaactgcgtgttcatgaccatgagcgacccccccccctggagcaagaacgtggagtacaccttcaccggcatctacaccttcgagagcctgatcaagatcctggccagaggcttctgcgtggacgacttcaccttcctgagagacccctggaactggctggacttcagcgtgatcatgatggcctacctgaccgagttcgtggacctgggcaacatcagcgccctgagaaccttcagagtgctgagagccctgaagaccatcaccgtgatccccggcctgaagaccatcgtgggcgccctgatccagagcgtgaagaagctgagcgacgtgatgatcctgaccgtgttctgcctgagcgtgttcgccctggtgggcctgcagctgttcatgggcaacctgagacagaagtgcgtgagatggcccccccccttcaacgacaccaacaccacctggtacagcaacgacacctggtacggcaacgacacctggtacggcaacgagatgtggtacggcaacgacagctggtacgccaacgacacctggaacagccacgccagctgggccaccaacgacaccttcgactgggacgcctacatcagcgacgagggcaacttctacttcctggagggcagcaacgacgccctgctgtgcggcaacagcagcgacgccggccactgccccgagggctacgagtgcatcaagaccggcagaaaccccaactacggctacaccagctacgacaccttcagctgggccttcctggccctgttcagactgatgacccaggactactgggagaacctgttccagctgaccctgagagccgccggcaagacctacatgatcttcttcgtggtgatcatcttcctgggcagcttctacctgatcaacctgatcctggccgtggtggccatggcctacgccgagcagaacgaggccaccctggccgaggacaaggagaaggaggaggagttccagcagatgctggagaagttcaagaagcaccaggaggagctggagaaggccaaggccgcccaggccctggagggcggcgaggccgacggcgaccccgcccacggcaaggactgcaacggcagcctggacaccagccagggcgagaagggcgcccccagacagagcagcagcggcgacagcggcatcagcgacgccatggaggagctggaggaggcccaccagaagtgccccccctggtggtacaagtgcgcccacaaggtgctgatctggaactgctgcgccccctggctgaagttcaagaacatcatccacctgatcgtgatggaccccttcgtggacctgggcatcaccatctgcatcgtgctgaacaccctgttcatggccatggagcactaccccatgaccgagcacttcgacaacgtgctgaccgtgggcaacctggtgttcaccggcatcttcaccgccgagatggtgctgaagctgatcgccatggacccctacgagtacttccagcagggctggaacatcttcgacagcatcatcgtgaccctgagcctggtggagctgggcctggccaacgtgcagggcctgagcgtgctgagaagcttcagactgctgagagtgttcaagctggccaagagctggcccaccctgaacatgctgatcaagatcatcggcaacagcgtgggcgccctgggcaacctgaccctggtgctggccatcatcgtgttcatcttcgccgtggtgggcatgcagctgttcggcaagagctacaaggagtgcgtgtgcaagatcgccctggactgcaacctgcccagatggcacatgcacgacttcttccacagcttcctgatcgtgttcagaatcctgtgcggcgagtggatcgagaccatgtgggactgcatggaggtggccggccaggccatgtgcctgaccgtgttcctgatggtgatggtgatcggcaacctggtggtgctgaacctgttcctggccctgctgctgagcagcttcagcgccgacagcctggccgccagcgacgaggacggcgagatgaacaacctgcagatcgccatcggcagaatcaagctgggcatcggcttcgccaaggccttcctgctgggcctgctgcacggcaagatcctgagccccaaggacatcatgctgagcctgggcgaggccgacggcgccggcgaggccggcgaggccggcgagaccgcccccgaggacgagaagaaggagccccccgaggaggacctgaagaaggacaaccacatcctgaaccacatgggcctggccgacggcccccccagcagcctggagctggaccacctgaacttcatcaacaacccctacctgaccatccaggtgcccatcgccagcgaggagagcgacctggagatgcccaccgaggaggagaccgacaccttcagcgagcccgaggacagcaagaagcccccccagcccctgtacgacggcaacagcagcgtgtgcagcaccgccgactacaagccccccgaggaggaccccgaggagcaggccgaggagaaccccgagggcgagcagcccgaggagtgcttcaccgaggcctgcgtgcagagatggccctgcctgtacgtggacatcagccagggcagaggcaagaagtggtggaccctgagaagagcctgcttcaagatcgtggagcacaactggttcgagaccttcatcgtgttcatgatcctgctgagcagcggcgccctggccttcgaggacatctacatcgagcagagaagagtgatcagaaccatcctggagtacgccgacaaggtgttcacctacatcttcatcatggagatgctgctgaagtgggtggcctacggcttcaaggtgtacttcaccaacgcctggtgctggctggacttcctgatcgtggacgtgagcatcatcagcctggtggccaactggctgggctacagcgagctgggccccatcaagagcctgagaaccctgagagccctgagacccctgagagccctgagcagattcgagggcatgagagtggtggtgaacgccctgctgggcgccatccccagcatcatgaacgtgctgctggtgtgcctgatcttctggctgatcttcagcatcatgggcgtgaacctgttcgccggcaagttctactactgcatcaacaccaccaccagcgagagattcgacatcagcgaggtgaacaacaagagcgagtgcgagagcctgatgcacaccggccaggtgagatggctgaacgtgaaggtgaactacgacaacgtgggcctgggctacctgagcctgctgcaggtggccaccttcaagggctggatggacatcatgtacgccgccgtggacagcagagagaaggaggagcagccccagtacgaggtgaacctgtacatgtacctgtacttcgtgatcttcatcatcttcggcagcttcttcaccctgaacctgttcatcggcgtgatcatcgacaacttcaaccagcagaagaagaagctgggcggcaaggacatcttcatgaccgaggagcagaagaagtactacaacgccatgaagaagctgggcagcaagaagccccagaagcccatccccagaccccagaacaagatccagggcatggtgtacgacctggtgaccaagcaggccttcgacatcaccatcatgatcctgatctgcctgaacatggtgaccatgatggtggagaccgacaaccagagccagctgaaggtggacatcctgtacaacatcaacatgatcttcatcatcatcttcaccggcgagtgcgtgctgaagatgctggccctgagacagtactacttcaccgtgggctggaacatcttcgacttcgtggtggtgatcctgagcatcgtgggcctggccctgagcgacctgatccagaagtacttcgtgagccccaccctgttcagagtgatcagactggccagaatcggcagagtgctgagactgatcagaggcgccaagggcatcagaaccctgctgttcgccctgatgatgagcctgcccgccctgttcaacatcggcctgctgctgttcctggtgatgttcatctacagcatcttcggcatgagcaacttcgcctacgtgaagaaggagagcggcatcgacgacatgttcaacttcgagaccttcggcaacagcatcatctgcctgttcgagatcaccaccagcgccggctgggacggcctgctgaaccccatcctgaacagcggcccccccgactgcgaccccaacctggagaaccccggcaccagcgtgaagggcgactgcggcaaccccagcatcggcatctgcttcttctgcagctacatcatcatcagcttcctgatcgtggtgaacatgtacatcgccatcatcctggagaacttcaacgtggccaccgaggagagcagcgagcccctgggcgaggacgacttcgagatgttctacgagacctgggagaagttcgaccccgacgccacccagttcatcgcctacagcagactgagcgacttcgtggacaccctgcaggagcccctgagaatcgccaagcccaacaagatcaagctgatcaccctggacctgcccatggtgcccggcgacaagatccactgcctggacatcctgttcgccctgaccaaggaggtgctgggcgacagcggcgagatggacgccctgaagcagaccatggaggagaagttcatggccgccaaccccagcaaggtgagctacgagcccatcaccaccaccctgaagagaaagcacgaggaggtgtgcgccatcaagatccagagagcctacagaagacacctgctgcagagaagcatgaagcaggccagctacatgtacagacacagccacgacggcagcggcgacgacgcccccgagaaggagggcctgctggccaacaccatgagcaagatgtacggccacgagaacggcaacagcagcagccccagccccgaggagaagggcgaggccggcgacgccggccccaccatgggcctgatgcccatcagccccagcgacaccgcctggccccccgcccccccccccggccagaccgtgagacccggcgtgaaggagagcctggtg

SEQ ID NO: 14 - protein, 1983 aa, Artificial Sequence [sequence omitted]

SEQ ID NO: 15 - DNA, 5949 bp, Artificial Sequence
  Polynucleotide encoding hNav1.5-alpha subunit
atggccaacttcctgctgcccagaggcaccagcagcttcagaagattcaccagagagagcctggccgccatcgagaagagaatggccgagaagcaggccagaggcagcaccaccctgcaggagagcagagagggcctgcccgaggaggaggcccccagaccccagctggacctgcaggccagcaagaagctgcccgacctgtacggcaaccccccccaggagctgatcggcgagcccctggaggacctggaccccttctacagcacccagaagaccttcatcgtgctgaacaagggcaagaccatcttcagattcagcgccaccaacgccctgtacgtgctgagccccttccaccccatcagaagagccgccgtgaagatcctggtgcacagcctgttcaacatgctgatcatgtgcaccatcctgaccaactgcgtgttcatggcccagcacgacccccccccctggaccaagtacgtggagtacaccttcaccgccatctacaccttcgagagcctggtgaagatcctggccagaggcttctgcctgcacgccttcaccttcctgagagacccctggaactggctggacttcagcgtgatcatcatggcctacgtgagcgagaacatcaagctgggcaacctgagcgccctgagaaccttcagagtgctgagagccctgaagaccatcagcgtgatccccggcctgaagaccatcgtgggcgccctgatccagagcgtgaagaagctggccgacgtgatggtgctgaccgtgttctgcctgagcgtgttcgccctgatcggcctgcagctgttcatgggcaacctgagacacaagtgcgtgagaaacttcaccgccctgaacggcaccaacggcagcgtggaggccgacggcctggtgtgggagagcctggacctgtacctgagcgaccccgagaactacctgctgaagaacggcaccagcgacgtgctgctgtgcggcaacagcagcgacgccggcacctgccccgagggctacagatgcctgaaggccggcgagaaccccgaccacggctacaccagcttcgacagcttcgcctgggccttcctggccctgttcagactgatgacccaggactgctgggagagactgtaccagcagaccctgagaagcgccggcaagatctacatgatcttcttcatgctggtgatcttcctgggcagcttctacctggtgaacctgatcctggccgtggtggccatggcctacgaggagcagaaccaggccaccatcgccgagaccgaggagaaggagaagagattccaggaggccatggagatgctgaagaaggagcacgaggccctgaccatcagaggcgtggacaccgtgagcagaagcagcctggagatgagccccctggcccccgtgaacagccacgagagaagaagcaagagaagaaagagaatgagcagcggcaccgaggagtgcggcgaggacagactgcccaagagcgacagcgaggacggccccagagccatgaaccacctgagcctgaccagaggcctgagcagaaccagcatgaagcccagaagcagcagaggcagcatcttcaccttcagaagaagagacctgggcagcgaggccgacttcgccgacgacgagaacagcaccgccggcgagagcgagagccacagaaccagcctgctggtgccctggcccctgagaagaaccagcgcccagggccagcccagccccggcaccagcgcccccggccacgccctgcacggcaagaagaacagcaccgtggactgcaacggcgtggtgagcctgctgggcgccggcgaccccgaggccaccagccccggcagccacctgctgagacccgtgatgctggagcacccccccgacaccaccacccccagcgaggagcccggcggcccccagatgctgaccagccaggccccctgcgtggacggcttcgaggagcccggcgccagacagagagccctgagcgccgtgagcgtgctgaccagcgccctggaggagctggaggagagcagacacaagtgccccccctgctggaacagactggcccagagatacctgatctgggagtgctgccccctgtggatgagcatcaagcagggcgtgaagctggtggtgatggaccccttcaccgacctgaccatcaccatgtgcatcgtgctgaacaccctgttcatggccctggagcactacaacatgaccagcgagttcgaggagatgctgcaggtgggcaacctggtgttcaccggcatcttcaccgccgagatgaccttcaagatcatcgccctggacccctactactacttccagcagggctggaacatcttcgacagcatcatcgtgatcctgagcctgatggagctgggcctgagcagaatgagcaacctgagcgtgctgagaagcttcagactgctgagagtgttcaagctggccaagagctggcccaccctgaacaccctgatcaagatcatcggcaacagcgtgggcgccctgggcaacctgaccctggtgctggccatcatcgtgttcatcttcgccgtggtgggcatgcagctgttcggcaagaactacagcgagctgagagacagcgacagcggcctgctgcccagatggcacatgatggacttcttccacgccttcctgatcatcttcagaatcctgtgcggcgagtggatcgagaccatgtgggactgcatggaggtgagcggccagagcctgtgcctgctggtgttcctgctggtgatggtgatcggcaacctggtggtgctgaacctgttcctggccctgctgctgagcagcttcagcgccgacaacctgaccgcccccgacgaggacagagagatgaacaacctgcagctggccctggccagaatccagagaggcctgagattcgtgaagagaaccacctgggacttctgctgcggcctgctgagacagagaccccagaagcccgccgccctggccgcccagggccagctgcccagctgcatcgccaccccctacagcccccccccccccgagaccgagaaggtgccccccaccagaaaggagaccagattcgaggagggcgagcagcccggccagggcacccccggcgaccccgagcccgtgtgcgtgcccatcgccgtggccgagagcgacaccgacgaccaggaggaggacgaggagaacagcctgggcaccgaggaggagagcagcaagcaggagagccagcccgtgagcggcggccccgaggccccccccgacagcagaacctggagccaggtgagcgccaccgccagcagcgaggccgaggccagcgccagccaggccgactggagacagcagtggaaggccgagccccaggcccccggctgcggcgagacccccgaggacagctgcagcgagggcagcaccgccgacatgaccaacaccgccgagctgctggagcagatccccgacctgggccaggacgtgaaggaccccgaggactgcttcaccgagggctgcgtgagaagatgcccctgctgcgccgtggacaccacccaggcccccggcaaggtgtggtggagactgagaaagacctgctaccacatcgtggagcacagctggttcgagaccttcatcatcttcatgatcctgctgagcagcggcgccctggccttcgaggacatctacctggaggagagaaagaccatcaaggtgctgctggagtacgccgacaagatgttcacctacgtgttcgtgctggagatgctgctgaagtgggtggcctacggcttcaagaagtacttcaccaacgcctggtgctggctggacttcctgatcgtggacgtgagcctggtgagcctggtggccaacaccctgggcttcgccgagatgggccccatcaagagcctgagaaccctgagagccctgagacccctgagagccctgagcagattcgagggcatgagagtggtggtgaacgccctggtgggcgccatccccagcatcatgaacgtgctgctggtgtgcctgatcttctggctgatcttcagcatcatgggcgtgaacctgttcgccggcaagttcggcagatgcatcaaccagaccgagggcgacctgcccctgaactacaccatcgtgaacaacaagagccagtgcgagagcctgaacctgaccggcgagctgtactggaccaaggtgaaggtgaacttcgacaacgtgggcgccggctacctggccctgctgcaggtggccaccttcaagggctggatggacatcatgtacgccgccgtggacagcagaggctacgaggagcagccccagtgggagtacaacctgtacatgtacatctacttcgtgatcttcatcatcttcggcagcttcttcaccctgaacctgttcatcggcgtgatcatcgacaacttcaaccagcagaagaagaagctgggcggccaggacatcttcatgaccgaggagcagaagaagtactacaacgccatgaagaagctgggcagcaagaagccccagaagcccatccccagacccctgaacaagtaccagggcttcatcttcgacatcgtgaccaagcaggccttcgacgtgaccatcatgttcctgatctgcctgaacatggtgaccatgatggtggagaccgacgaccagagccccgagaagatcaacatcctggccaagatcaacctgctgttcgtggccatcttcaccggcaccgtgctgagcgacatcatccagaagtacttcttcagccccaccctgttcagagtgatcagactggccagaatcggcagaatcctgagactgatcagaggcgccaagggcatcagaaccctgctgttcgccctgatgatgagcctgcccgccctgttcaacatcggcctgctgctgttcctggtgatgttcatctacagcatcttcggcatggccaacttcgcctacgtgaagtgggaggccggcatcgacgacatgttcaacttccagaccttcgccaacagcatgctgtgcctgttccagatcaccaccagcgccggctgggacggcctgctgagccccatcctgaacaccggccccccctactgcgaccccaccctgcccaacagcaacggcagcagaggcgactgcggcagccccgccgtgggcatcctgttcttcaccacctacatcatcatcagcttcctgatcgtggtgaacatgtacatcgccatcatcctggagaacttcagcgtggccaccgaggagagcaccgagcccctgagcgaggacgacttcgacatgttctacgagatctgggagaagttcgaccccgaggccacccagttcatcgagtacagcgtgctgagcgacttcgccgacgccctgagcgagcccctgagaatcgccaagcccaaccagatcagcctgatcaacatggacctgcccatggtgagcggcgacagaatccactgcatggacatcctgttcgccttcaccaagagagtgctgggcgagagcggcgagatggacgccctgaagatccagatggaggagaagttcatggccgccaaccccagcaagatcagctacgagcccatcaccaccaccctgagaagaaagcacgaggaggtgagcgccatggtgatccagagagccttcagaagacacctgctgcagagaagcctgaagcacgccagcttcctgttcagacagcaggccggcagcggcctgagcgaggaggacgcccccgagagagagggcctgatcgcctacgtgatgagcgagaacttcagcagacccctgggcccccccagcagcagcagcatcagcagcaccagcttcccccccagctacgacagcgtgaccagagccaccagcgacaacctgcaggtgagaggcagcgactacagccacagcgaggacctggccgacttcccccccagccccgacagagacagagagagcatcgtg

SEQ ID NO: 16 - protein, 1980 aa, Artificial Sequence
  hNav1.6-alpha subunit
MAARLLAPPGPDSFKPFTPESLANIERRIAESKLKKPPKADGSHREDDEDSKPKPNSDLEAGKSLPFIYGDIPQGLVAVPLEDFDPYYLTQKTFVVLNRGKTLFRFSATPALYILSPFNLIRRIAIKILIHSVFSMIIMCTILTNCVFMTFSNPPDWSKNVEYTFTGIYTFESLVKIIARGFCIDGFTFLRDPWNWLDFSVIMMAYITEFVNLGNVSALRTFRVLRALKTISVIPGLKTIVGALIQSVKKLSDVMILTVFCLSVFALIGLQLFMGNLRNKCVVWPINFNESYLENGTKGFDWEEYINNKTNFYTVPGMLEPLLCGNSSDAGQCPEGYQCMKAGRNPNYGYTSFDTFSWAFLALFRLMTQDYWENLYQLTLRAAGKTYMIFFVLVIFVGSFYLVNLILAVVAMAYEEQNQATLEEAEQKEAEFKAMLEQLKKQQEEAQAAAMATSAGTVSEDAIEEEGEEGGGSPRSSSEISKLSSKSAKERRNRRKKRKQKELSEGEEKGDPEKVFKSESEDGMRRKAFRLPDNRIGRKFSIMNQSLLSIPGSPFLSRHNSKSSIFSFRGPGRFRDPGSENEFADDEHSTVEESEGRRDSLFIPIRARERRSSYSGYSGYSQGSRSSRIFPSLRRSVKRNSTVDCNGVVSLIGGPGSHIGGRLLPEATTEVEIKKKGPGSLLVSMDQLASYGRKDRINSIMSVVTNTLVEELEESQRKCPPCWYKFANTFLIWECHPYWIKLKEIVNLIVMDPFVDLAITICIVLNTLFMAMEHHPMTPQFEHVLAVGNLVFTGIFTAEMFLKLIAMDPYYYFQEGWNIFDGFIVSLSLMELSLADVEGLSVLRSFRLLRVFKLAKSWPTLNMLIKIIGNSVGALGNLTLVLAIIVFIFAVVGMQLFGKSYKECVCKINQDCELPRWHMHDFFHSFLIVFRVLCGEWIETMWDCMEVAGQAMCLIVFMMVMVIGNLVVLNLFLALLLSSFSADNLAATDDDGEMNNLQISVIRIKKGVAWTKLKVHAFMQAHFKQREADEVKPLDELYEKKANCIANHTGADIHRNGDFQKNGNGTTSGIGSSVEKYIIDEDHMSFINNPNLTVRVPIAVGESDFENLNTEDVSSESDPEGSKDKLDDTSSSEGSTIDIKPEVEEVPVEQPEEYLDPDACFTEGCVQRFKCCQVNIEEGLGKSWWILRKTCFLIVEHNWFETFIIFMILLSSGALAFEDIYIEQRKTIRTILEYADKVFTYIFILEMLLKWTAYGFVKFFTNAWCWLDFLIVAVSLVSLIANALGYSELGAIKSLRTLRALRPLRALSRFEGMRVVVNALVGAIPSIMNVLLVCLIFWLIFSIMGVNLFAGKYHYCFNETSEIRFEIEDVNNKTECEKLMEGNNTEIRWKNVKINFDNVGAGYLALLQVATFKGWMDIMYAAVDSRKPDEQPKYEDNIYMYIYFVIFIIFGSFFTLNLFIGVIIDNFNQQKKKFGGQDIFMTEEQKKYYNAMKKLGSKKPQKPIPRPLNKIQGIVFDFVTQQAFDIVIMMLICLNMVTMMVETDTQSKQMENILYWINLVFVIFFTCECVLKMFALRHYYFTIGWNIFDFVVVILSIVGMFLADIIEKYFVSPTLFRVIRLARIGRILRLIKGAKGIRTLLFALMMSLPALFNIGLLLFLVMFIFSIFGMSNFAYVKHEAGIDDMFNFETFGNSMICLFQITTSAGWDGLLLPILNRPPDCSLDKEHPGSGFKGDCGNPSVGIFFFVSYIIISFLIVVNMYIAIILENFSVATEESADPLSEDDFETFYEIWEKFDPDATQFIEYCKLADFADALEHPLRVPKPNTIELIAMDLPMVSGDRIHCLDILFAFTKRVLGDSGELDILRQQMEERFVASNPSKVSYEPITTTLRRKQEEVSAVVLQRAYRGHLARRGFICKKTTSNKLENGGTHREKKESTPSTASLPSYDSVTKPEKEKQQRAEEGRRERAKRQKEVRESKC

SEQ ID NO: 17 - DNA, 5940 bp, Artificial Sequence
  Polynucleotide encoding hNav1.6-alpha subunit
atggcagcgcggctgcttgcaccaccaggccctgatagtttcaagcctttcacccctgagtcactggcaaacattgagaggcgcattgctgagagcaagctcaagaaaccaccaaaggccgatggcagtcatcgggaggacgatgaggacagcaagcccaagccaaacagcgacctggaagcagggaagagtttgcctttcatctacggggacatcccccaaggcctggttgcagttcccctggaggactttgacccatactatttgacgcagaaaacctttgtagtattaaacagagggaaaactctcttcagatttagtgccacgcctgccttgtacattttaagtccttttaacctgataagaagaatagctattaaaattttgatacattcagtatttagcatgatcattatgtgcactattttgaccaactgtgtattcatgacttttagtaaccctcctgactggtcgaagaatgtggagtacacgttcacagggatttatacatttgaatcactagtgaaaatcattgcaagaggtttctgcatagatggctttacctttttacgggacccatggaactggttagatttcagtgtcatcatgatggcgtatataacagagtttgtaaacctaggcaatgtttcagctctacgcactttcagggtactgagggctttgaaaactatttcggtaatcccaggcctgaagacaattgtgggtgccctgattcagtctgtgaagaaactgtcagatgtgatgatcctgacagtgttctgcctgagtgtttttgccttgatcggactgcagctgttcatggggaaccttcgaaacaagtgtgttgtgtggcccataaacttcaacgagagctatcttgaaaatggcaccaaaggctttgattgggaagagtatatcaacaataaaacaaatttctacacagttcctggcatgctggaacctttactctgtgggaacagttctgatgctgggcaatgcccagagggataccagtgtatgaaagcaggaaggaaccccaactatggttacacaagttttgacacttttagctgggccttcttggcattatttcgccttatgacccaggactattgggaaaacttgtatcaattgactttacgagcagccgggaaaacatacatgatcttcttcgtcttggtcatctttgtgggttctttctatctggtgaacttgatcttggctgtggtggccatggcttatgaagaacagaatcaggcaacactggaggaggcagaacaaaaagaggctgaatttaaagcaatgttggagcaacttaagaagcaacaggaagaggcacaggctgctgcgatggccacttcagcaggaactgtctcagaagatgccatagaggaagaaggtgaagaaggagggggctcccctcggagctcttctgaaatctctaaactcagctcaaagagtgcaaaggaaagacgtaacaggagaaagaagaggaagcaaaaggaactctctgaaggagaggagaaaggggatcccgagaaggtgtttaagtcagagtcagaagatggcatgagaaggaaggcctttcggctgccagacaacagaatagggaggaaattttccatcatgaatcagtcactgctcagcatcccaggctcgcccttcctctcccgccacaacagcaagagcagcatcttcagtttcaggggacctgggcggttccgagacccgggctccgagaatgagttcgcggatgacgagcacagcacggtggaggagagcgagggccgccgggactccctcttcatccccatccgggcccgcgagcgccggagcagctacagcggctacagcggctacagccagggcagccgctcctcgcgcatcttccccagcctgcggcgcagcgtgaagcgcaacagcacggtggactgcaacggcgtggtgtccctcatcggcggccccggctcccacatcggcgggcgtctcctgccagaggctacaactgaggtggaaattaagaagaaaggccctggatctcttttagtttccatggaccaattagcctcctacgggcggaaggacagaatcaacagtataatgagtgttgttacaaatacactagtagaagaactggaagagtctcagagaaagtgcccgccatgctggtataaatttgccaacactttcctcatctgggagtgccacccctactggataaaactgaaagagattgtgaacttgatagttatggacccttttgtggatttagccatcaccatctgcatcgtcctgaatacactgtttatggcaatggagcaccatcctatgacaccacaatttgaacatgtcttggctgtaggaaatctggttttcactggaattttcacagcggaaatgttcctgaagctcatagccatggatccctactattatttccaagaaggttggaacatttttgacggatttattgtctccctcagtttaatggaactgagtctagcagacgtggaggggctttcagtgctgcgatctttccgattgctccgagtcttcaaattggccaaatcctggcccaccctgaacatgctaatcaagattattggaaattcagtgggtgccctgggcaacctgacactggtgctggccattattgtcttcatctttgccgtggtggggatgcaactctttggaaaaagctacaaagagtgtgtctgcaagatcaaccaggactgtgaactccctcgctggcatatgcatgactttttccattccttcctcattgtctttcgagtgttgtgcggggagtggattgagaccatgtgggactgcatggaagtggcaggccaggccatgtgcctcattgtctttatgatggtcatggtgattggcaacttggtggtgctgaacctgtttctggccttgctcctgagctccttcagtgcagacaacctggctgccacagatgacgatggggaaatgaacaacctccagatctcagtgatccgtatcaagaagggtgtggcctggaccaaactaaaggtgcacgccttcatgcaggcccactttaagcagcgtgaggctgatgaggtgaagcctctggatgagttgtatgaaaagaaggccaactgtatcgccaatcacaccggtgcagacatccaccggaatggtgacttccagaagaatggcaatggcacaaccagcggcattggcagcagcgtggagaagtacatcattgatgaggaccacatgtccttcatcaacaaccccaacttgactgtacgggtacccattgctgtgggcgagtctgactttgagaacctcaacacagaggatgttagcagcgagtcggatcctgaaggcagcaaagataaactagatgacaccagctcctctgaaggaagcaccattgatatcaaaccagaagtagaagaggtccctgtggaacagcctgaggaatacttggatccagatgcctgcttcacagaaggttgtgtccagcggttcaagtgctgccaggtcaacatcgaggaagggctaggcaagtcttggtggatcctgcggaaaacctgcttcctcatcgtggagcacaactggtttgagaccttcatcatcttcatgattctgctgagcagtggcgccctggccttcgaggacatctacattgagcagagaaagaccatccgcaccatcctggaatatgctgacaaagtcttcacctatatcttcatcctggagatgttgctcaagtggacagcctatggcttcgtcaagttcttcaccaatgcctggtgttggctggacttcctcattgtggctgtctctttagtcagccttatagctaatgccctgggctactcggaactaggtgccataaagtcccttaggaccctaagagctttgagacccttaagagccttatcacgatttgaagggatgagggtggtggtgaatgccttggtgggcgccatcccctccatcatgaatgtgctgctggtgtgtctcatcttctggctgattttcagcatcatgggagttaacttgtttgcgggaaagtaccactactgctttaatgagacttctgaaatccgatttgaaattgaagatgtcaacaataaaactgaatgtgaaaagcttatggaggggaacaatacagagatcagatggaagaacgtgaagatcaactttgacaatgttggggcaggatacctggcccttcttcaagtagcaaccttcaaaggctggatggacatcatgtatgcagctgtagattcccggaagcctgatgagcagcctaagtatgaggacaatatctacatgtacatctattttgtcatcttcatcatcttcggctccttcttcaccctgaacctgttcattggtgtcatcattgataacttcaatcaacaaaagaaaaagttcggaggtcaggacatcttcatgaccgaagaacagaagaagtactacaatgccatgaaaaagctgggctcaaagaagccacagaaacctattccccgccccttgaacaaaatccaaggaatcgtctttgattttgtcactcagcaagcctttgacattgttatcatgatgctcatctgccttaacatggtgacaatgatggtggagacagacactcaaagcaagcagatggagaacatcctctactggattaacctggtgtttgttatcttcttcacctgtgagtgtgtgctcaaaatgtttgcgttgaggcactactacttcaccattggctggaacatcttcgacttcgtggtagtcatcctctccattgtgggaatgttcctggcagatataattgagaaatactttgtttccccaaccctattccgagtcatccgattggcccgtattgggcgcatcttgcgtctgatcaaaggcgccaaagggattcgtaccctgctctttgccttaatgatgtccttgcctgccctgttcaacatcggccttctgctcttcctggtcatgttcatcttctccatttttgggatgtccaattttgcatatgtgaagcacgaggctggtatcgatgacatgttcaactttgagacatttggcaacagcatgatctgcctgtttcaaatcacaacctcagctggttgggatggcctgctgctgcccatcctaaaccgcccccctgactgcagcctagataaggaacacccagggagtggctttaagggagattgtgggaacccctcagtgggcatcttcttctttgtaagctacatcatcatctctttcctaattgtcgtgaacatgtacattgccatcatcctggagaacttcagtgtagccacagaggaaagtgcagaccctctgagtgaggatgactttgagaccttctatgagatctgggagaagttcgaccccgatgccacccagttcattgagtactgtaagctggcagactttgcagatgccttggagcatcctctccgagtgcccaagcccaataccattgagctcatcgctatggatctgccaatggtgagcggggatcgcatccactgcttggacatcctttttgccttcaccaagcgggtcctgggagatagcggggagttggacatcctgcggcagcagatggaagagcggttcgtggcatccaatccttccaaagtgtcttacgagccaatcacaaccacactgcgtcgcaagcaggaggaggtatctgcagtggtcctgcagcgtgcctaccggggacatttggcaaggcggggcttcatctgcaaaaagacaacttctaataagctggagaatggaggcacacaccgggagaaaaaagagagcaccccatctacagcctccctcccgtcctatgacagtgtaactaaacctgaaaaggagaaacagcagcgggcagaggaaggaagaagggaaagagccaaaagacaaaaagaggtcagagaatccaagtgt

SEQ ID NO: 18 - protein, 1977 aa, Artificial Sequence
  hNav1.7-alpha subunit
MAMLPPPGPQSFVHFTKQSLALIEQRIAERKSKEPKEEKKDDDEEAPKPSSDLEAGKQLPFIYGDIPPGMVSEPLEDLDPYYADKKTFIVLNKGKTIFRFNATPALYMLSPFSPLRRISIKILVHSLFSMLIMCTILTNCIFMTMNNPPDWTKNVEYTFTGIYTFESLVKILARGFCVGEFTFLRDPWNWLDFVVIVFAYLTEFVNLGNVSALRTFRVLRALKTISVIPGLKTIVGALIQSVKKLSDVMILTVFCLSVFALIGLQLFMGNLKHKCFRNSLENNETLESIMNTLESEEDFRKYFYYLEGSKDALLCGFSTDSGQCPEGYTCVKIGRNPDYGYTSFDTFSWAFLALFRLMTQDYWENLYQQTLRAAGKTYMIFFVVVIFLGSFYLINLILAVVAMAYEEQNQANIEEAKQKELEFQQMLDRLKKEQEEAEAIAAAAAEYTSIRRSRIMGLSESSSETSKLSSKSAKERRNRRKKKNQKKLSSGEEKGDAEKLSKSESEDSIRRKSFHLGVEGHRRAHEKRLSTPNQSPLSIRGSLFSARRSSRTSLFSFKGRGRDIGSETEFADDEHSIFGDNESRRGSLFVPHRPQERRSSNISQASRSPPMLPVNGKMHSAVDCNGVVSLVDGRSALMLPNGQLLPEGTTNQIHKKRRCSSYLLSEDMLNDPNLRQRAMSRASILTNTVEELEESRQKCPPWWYRFAHKFLIWNCSPYWIKFKKCIYFIVMDPFVDLAITICIVLNTLFMAMEHHPMTEEFKNVLAIGNLVFTGIFAAEMVLKLIAMDPYEYFQVGWNIFDSLIVTLSLVELFLADVEGLSVLRSFRLLRVFKLAKSWPTLNMLIKIIGNSVGALGNLTLVLAIIVFIFAVVGMQLFGKSYKECVCKINDDCTLPRWHMNDFFHSFLIVFRVLCGEWIETMWDCMEVAGQAMCLIVYMMVMVIGNLVVLNLFLALLLSSFSSDNLTAIEEDPDANNLQIAVTRIKKGINYVKQTLREFILKAFSKKPKISREIRQAEDLNTKKENYISNHTLAEMSKGHNFLKEKDKISGFGSSVDKHLMEDSDGQSFIHNPSLTVTVPIAPGESDLENMNAEELSSDSDSEYSKVRLNRSSSSECSTVDNPLPGEGEEAEAEPMNSDEPEACFTDGCVRRFSCCQVNIESGKGKIWWNIRKTCYKIVEHSWFESFIVLMILLSSGALAFEDIYIERKKTIKIILEYADKIFTYIFILEMLLKWIAYGYKTYFTNAWCWLDFLIVDVSLVTLVANTLGYSDLGPIKSLRTLRALRPLRALSRFEGMRVVVNALIGAIPSIMNVLLVCLIFWLIFSIMGVNLFAGKFYECINTTDGSRFPASQVPNRSECFALMNVSQNVRWKNLKVNFDNVGLGYLSLLQVATFKGWTIIMYAAVDSVNVDKQPKYEYSLYMYIYFVVFIIFGSFFTLNLFIGVIIDNFNQQKKKLGGQDIFMTEEQKKYYNAMKKLGSKKPQKPIPRPGNKIQGCIFDLVTNQAFDISIMVLICLNMVTMMVEKEGQSQHMTEVLYWINVVFIILFTGECVLKLISLRHYYFTVGWNIFDFVVVIISIVGMFLADLIETYFVSPTLFRVIRLARIGRILRLVKGAKGIRTLLFALMMSLPALFNIGLLLFLVMFIYAIFGMSNFAYVKKEDGINDMFNFETFGNSMICLFQITTSAGWDGLLAPILNSKPPDCDPKKVHPGSSVEGDCGNPSVGIFYFVSYIIISFLVVVNMYIAVILENFSVATEESTEPLSEDDFEMFYEVWEKFDPDATQFIEFSKLSDFAAALDPPLLIAKPNKVQLIAMDLPMVSGDRIHCLDILFAFTKRVLGESGEMDSLRSQMEERFMSANPSKVSYEPITTTLKRKQEDVSATVIQRAYRRYRLRQNVKNISSIYIKDGDRDDDLLNKKDMAFDNVNENSSPEKTDATSSTTSPPSYDSVTKPDKEKYEQDRTEKEDKGKDSKESKK

SEQ ID NO: 19 - DNA, 5931 bp, Artificial Sequence
  Polynucleotide encoding hNav1.7-alpha subunit
atggcaatgttgcctcccccaggacctcagagctttgtccatttcacaaaacagtctcttgccctcattgaacaacgcattgctgaaagaaaatcaaaggaacccaaagaagaaaagaaagatgatgatgaagaagccccaaagccaagcagtgacttggaagctggcaaacagctgcccttcatctatggggacattcctcccggcatggtgtcagagcccctggaggacttggacccctactatgcagacaaaaagactttcatagtattgaacaaagggaaaacaatcttccgtttcaatgccacacctgctttatatatgctttctcctttcagtcctctaagaagaatatctattaagattttagtacactccttattcagcatgctcatcatgtgcactattctgacaaactgcatatttatgaccatgaataacccaccggactggaccaaaaatgtcgagtacacttttactggaatatatacttttgaatcacttgtaaaaatccttgcaagaggcttctgtgtaggagaattcacttttcttcgtgacccgtggaactggctggattttgtcgtcattgtttttgcgtatttaacagaatttgtaaacctaggcaatgtttcagctcttcgaactttcagagtattgagagctttgaaaactatttctgtaatcccaggcctgaagacaattgtaggggctttgatccagtcagtgaagaagctttctgatgtcatgatcctgactgtgttctgtctgagtgtgtttgcactaattggactacagctgttcatgggaaacctgaagcataaatgttttcgaaattcacttgaaaataatgaaacattagaaagcataatgaataccctagagagtgaagaagactttagaaaatatttttattacttggaaggatccaaagatgctctcctttgtggtttcagcacagattcaggtcagtgtccagaggggtacacctgtgtgaaaattggcagaaaccctgattatggctacacgagctttgacactttcagctgggccttcttagccttgtttaggctaatgacccaagattactgggaaaacctttaccaacagacgctgcgtgctgctggcaaaacctacatgatcttctttgtcgtagtgattttcctgggctccttttatctaataaacttgatcctggctgtggttgccatggcatatgaagaacagaaccaggcaaacattgaagaagctaaacagaaagaattagaatttcaacagatgttagaccgtcttaaaaaagagcaagaagaagctgaggcaattgcagcggcagcggctgaatatacaagtattaggagaagcagaattatgggcctctcagagagttcttctgaaacatccaaactgagctctaaaagtgctaaagaaagaagaaacagaagaaagaaaaagaatcaaaagaagctctccagtggagaggaaaagggagatgctgagaaattgtcgaaatcagaatcagaggacagcatcagaagaaaaagtttccaccttggtgtcgaagggcataggcgagcacatgaaaagaggttgtctacccccaatcagtcaccactcagcattcgtggctccttgttttctgcaaggcgaagcagcagaacaagtctttttagtttcaaaggcagaggaagagatataggatctgagactgaatttgccgatgatgagcacagcatttttggagacaatgagagcagaaggggctcactgtttgtgccccacagaccccaggagcgacgcagcagtaacatcagccaagccagtaggtccccaccaatgctgccggtgaacgggaaaatgcacagtgctgtggactgcaacggtgtggtctccctggttgatggacgctcagccctcatgctccccaatggacagcttctgccagagggcacgaccaatcaaatacacaagaaaaggcgttgtagttcctatctcctttcagaggatatgctgaatgatcccaacctcagacagagagcaatgagtagagcaagcatattaacaaacactgtggaagaacttgaagagtccagacaaaaatgtccaccttggtggtacagatttgcacacaaattcttgatctggaattgctctccatattggataaaattcaaaaagtgtatctattttattgtaatggatccttttgtagatcttgcaattaccatttgcatagttttaaacacattatttatggctatggaacaccacccaatgactgaggaattcaaaaatgtacttgctataggaaatttggtctttactggaatctttgcagctgaaatggtattaaaactgattgccatggatccatatgagtatttccaagtaggctggaatatttttgacagccttattgtgactttaagtttagtggagctctttctagcagatgtggaaggattgtcagttctgcgatcattcagactgctccgagtcttcaagttggcaaaatcctggccaacattgaacatgctgattaagatcattggtaactcagtaggggctctaggtaacctcaccttagtgttggccatcatcgtcttcatttttgctgtggtcggcatgcagctctttggtaagagctacaaagaatgtgtctgcaagatcaatgatgactgtacgctcccacggtggcacatgaacgacttcttccactccttcctgattgtgttccgcgtgctgtgtggagagtggatagagaccatgtgggactgtatggaggtcgctggtcaagctatgtgccttattgtttacatgatggtcatggtcattggaaacctggtggtcctaaacctatttctggccttattattgagctcatttagttcagacaatcttacagcaattgaagaagaccctgatgcaaacaacctccagattgcagtgactagaattaaaaagggaataaattatgtgaaacaaaccttacgtgaatttattctaaaagcattttccaaaaagccaaagatttccagggagataagacaagcagaagatctgaatactaagaaggaaaactatatttctaaccatacacttgctgaaatgagcaaaggtcacaatttcctcaaggaaaaagataaaatcagtggttttggaagcagcgtggacaaacacttgatggaagacagtgatggtcaatcatttattcacaatcccagcctcacagtgacagtgccaattgcacctggggaatccgatttggaaaatatgaatgctgaggaacttagcagtgattcggatagtgaatacagcaaagtgagattaaaccggtcaagctcctcagagtgcagcacagttgataaccctttgcctggagaaggagaagaagcagaggctgaacctatgaattccgatgagccagaggcctgtttcacagatggttgtgtatggaggttctcatgctgccaagttaacatagagtcagggaaaggaaaaatctggtggaacatcaggaaaacctgctacaagattgttgaacacagttggtttgaaagcttcattgtcctcatgatcctgctcagcagtggtgccctggcttttgaagatatttatattgaaaggaaaaagaccattaagattatcctggagtatgcagacaagatcttcacttacatcttcattctggaaatgcttctaaaatggatagcatatggttataaaacatatttcaccaatgcctggtgttggctggatttcctaattgttgatgtttctttggttactttagtggcaaacactcttggctactcagatcttggccccattaaatcccttcggacactgagagctttaagacctctaagagccttatctagatttgaaggaatgagggtcgttgtgaatgcactcataggagcaattccttccatcatgaatgtgctacttgtgtgtcttatattctggctgatattcagcatcatgggagtaaatttgtttgctggcaagttctatgagtgtattaacaccacagatgggtcacggtttcctgcaagtcaagttccaaatcgttccgaatgttttgcccttatgaatgttagtcaaaatgtgcgatggaaaaacctgaaagtgaactttgataatgtcggacttggttacctatctctgcttcaagttgcaacttttaagggatggacgattattatgtatgcagcagtggattctgttaatgtagacaagcagcccaaatatgaatatagcctctacatgtatatttattttgtcgtctttatcatctttgggtcattcttcactttgaacttgttcattggtgtcatcatagataatttcaaccaacagaaaaagaagcttggaggtcaagacatctttatgacagaagaacagaagaaatactataatgcaatgaaaaagctggggtccaagaagccacaaaagccaattcctcgaccagggaacaaaatccaaggatgtatatttgacctagtgacaaatcaagcctttgatattagtatcatggttcttatctgtctcaacatggtaaccatgatggtagaaaaggagggtcaaagtcaacatatgactgaagttttatattggataaatgtggtttttataatccttttcactggagaatgtgtgctaaaactgatctccctcagacactactacttcactgtaggatggaatatttttgattttgtggttgtgattatctccattgtaggtatgtttctagctgatttgattgaaacgtattttgtgtcccctaccctgttccgagtgatccgtcttgccaggattggccgaatcctacgtctagtcaaaggagcaaaggggatccgcacgctgctctttgctttgatgatgtcccttcctgcgttgtttaacatcggcctcctgctcttcctggtcatgttcatctacgccatctttggaatgtccaactttgcctatgttaaaaaggaagatggaattaatgacatgttcaattttgagacctttggcaacagtatgatttgcctgttccaaattacaacctctgctggctgggatggattgctagcacctattcttaacagtaagccacccgactgtgacccaaaaaaagttcatcctggaagttcagttgaaggagactgtggtaacccatctgttggaatattctactttgttagttatatcatcatatccttcctggttgtggtgaacatgtacattgcagtcatactggagaattttagtgttgccactgaagaaagtactgaacctctgagtgaggatgactttgagatgttctatgaggtttgggagaagtttgatcccgatgcgacccagtttatagagttctctaaactctctgattttgcagctgccctggatcctcctcttctcatagcaaaacccaacaaagtccagctcattgccatggatctgcccatggttagtggtgaccggatccattgtcttgacatcttatttgcttttacaaagcgtgttttgggtgagagtggggagatggattctcttcgttcacagatggaagaaaggttcatgtctgcaaatccttccaaagtgtcctatgaacccatcacaaccacactaaaacggaaacaagaggatgtgtctgctactgtcattcagcgtgcttatagacgttaccgcttaaggcaaaatgtcaaaaatatatcaagtatatacataaaagatggagacagagatgatgatttactcaataaaaaagatatggcttttgataatgttaatgagaactcaagtccagaaaaaacagatgccacttcatccaccacctctccaccttcatatgatagtgtaacaaagccagacaaagagaaatatgaacaagacagaacagaaaaggaagacaaagggaaagacagcaaggaaagcaaaaaa

SEQ ID NO: 20 - protein, 1956 aa, Artificial Sequence
  hNav1.8-alpha subunit
MEFPIGSLETNNFRRFTPESLVEIEKQIAAKQGTKKAREKHREQKDQEEKPRPQLDLKACNQLPKFYGELPAELIGEPLEDLDPFYSTHRTFMVLNKGRTISRFSATRALWLFSPFNLIRRTAIKVSVHSWFSLFITVTILVNCVCMTRTDLPEKIEYVFTVIYTFEALIKILARGFCLNEFTYLRDPWNWLDFSVITLAYVGTAIDLRGISGLRTFRVLRALKTVSVIPGLKVIVGALIHSVKKLADVTILTIFCLSVFALVGLQLFKGNLKNKCVKNDMAVNETTNYSSHRKPDIYINKRGTSDPLLCGNGSDSGHCPDGYICLKTSDNPDFNYTSFDSFAWAFLSLFRLMTQDSWERLYQQTLRTSGKIYMIFFVLVIFLGSFYLVNLILAVVTMAYEEQNQATTDEIEAKEKKFQEALEMLRKEQEVLAALGIDTTSLHSHNGSPLTSKNASERRHRIKPRVSEGSTEDNKSPRSDPYNQRRMSFLGLASGKRRASHGSVFHFRSPGRDISLPEGVTDDGVFPGDHESHRGSLLLGGGAGQQGPLPRSPLPQPSNPDSRHGEDEHQPPPTSELAPGAVDVSAFDAGQKKTFLSAEYLDEPFRAQRAMSVVSIITSVLEELEESEQKCPPCLTSLSQKYLIWDCCPMWVKLKTILFGLVTDPFAELTITLCIVVNTIFMAMEHHGMSPTFEAMLQIGNIVFTIFFTAEMVFKIIAFDPYYYFQKKWNIFDCIIVTVSLLELGVAKKGSLSVLRSFRLLRVFKLAKSWPTLNTLIKIIGNSVGALGNLTIILAIIVFVFALVGKQLLGENYRNNRKNISAPHEDWPRWHMHDFFHSFLIVFRILCGEWIENMWACMEVGQKSICLILFLTVMVLGNLVVLNLFIALLLNSFSADNLTAPEDDGEVNNLQVALARIQVFGHRTKQALCSFFSRSCPFPQPKAEPELVVKLPLSSSKAENHIAANTARGSSGGLQAPRGPRDEHSDFIANPTVWVSVPIAEGESDLDDLEDDGGEDAQSFQQEVIPKGQQEQLQQVERCGDHLTPRSPGTGTSSEDLAPSLGETWKDESVPQVPAEGVDDTSSSEGSTVDCLDPEEILRKIPELADDLEEPDDCFTEGCIRHCPCCKLDTTKSPWDVGWQVRKTCYRIVEHSWFESFIIFMILLSSGSLAFEDYYLDQKPTVKALLEYTDRVFTFIFVFEMLLKWVAYGFKKYFTNAWCWLDFLIVNISLISLTAKILEYSEVAPIKALRTLRALRPLRALSRFEGMRVVVDALVGAIPSIMNVLLVCLIFWLIFSIMGVNLFAGKFWRCINYTDGEFSLVPLSIVNNKSDCKIQNSTGSFFWVNVKVNFDNVAMGYLALLQVATFKGWMDIMYAAVDSREVNMQPKWEDNVYMYLYFVIFIIFGGFFTLNLFVGVIIDNFNQQKKKLGGQDIFMTEEQKKYYNAMKKLGSKKPQKPIPRPLNKFQGFVFDIVTRQAFDITIMVLICLNMITMMVETDDQSEEKTKILGKINQFFVAVFTGECVMKMFALRQYYFTNGWNVFDFIVVVLSIASLIFSAILKSLQSYFSPTLFRVIRLARIGRILRLIRAAKGIRTLLFALMMSLPALFNIGLLLFLVMFIYSIFGMSSFPHVRWEAGIDDMFNFQTFANSMLCLFQITTSAGWDGLLSPILNTGPPYCDPNLPNSNGTRGDCGSPAVGIIFFTTYIIISFLIMVNMYIAVILENFNVATEESTEPLSEDDFDMFYETWEKFDPEATQFITFSALSDFADTLSGPLRIPKPNRNILIQMDLPLVPGDKIHCLDILFAFTKNVLGESGELDSLKANMEEKFMATNLSKSSYEPIATTLRWKQEDISATVIQKAYRSYVLHRSMALSNTPCVPRAEEEAASLPDEGFVAFTANENCVLPDKSETASATSFPPSYESVTRGLSDRVNMRTSSSIQNEDEATSMELIAPGP

SEQ ID NO: 21 - DNA, 5868 bp, Artificial Sequence
  Polynucleotide encoding hNav1.8-alpha subunit
atggagttccccatcggcagcctggagaccaacaacttcagaagattcacccccgagagcctggtggagatcgagaagcagatcgccgccaagcagggcaccaagaaggccagagagaagcacagagagcagaaggaccaggaggagaagcccagaccccagctggacctgaaggcctgcaaccagctgcccaagttctacggcgagctgcccgccgagctgatcggcgagcccctggaggacctggaccccttctacagcacccacagaaccttcatggtgctgaacaagggcagaaccatcagcagattcagcgccaccagagccctgtggctgttcagccccttcaacctgatcagaagaaccgccatcaaggtgagcgtgcacagctggttcagcctgttcatcaccgtgaccatcctggtgaactgcgtgtgcatgaccagaaccgacctgcccgagaagatcgagtacgtgttcaccgtgatctacaccttcgaggccctgatcaagatcctggccagaggcttctgcctgaacgagttcacctacctgagagacccctggaactggctggacttcagcgtgatcaccctggcctacgtgggcaccgccatcgacctgagaggcatcagcggcctgagaaccttcagagtgctgagagccctgaagaccgtgagcgtgatccccggcctgaaggtgatcgtgggcgccctgatccacagcgtgaagaagctggccgacgtgaccatcctgaccatcttctgcctgagcgtgttcgccctggtgggcctgcagctgttcaagggcaacctgaagaacaagtgcgtgaagaacgacatggccgtgaacgagaccaccaactacagcagccacagaaagcccgacatctacatcaacaagagaggcaccagcgaccccctgctgtgcggcaacggcagcgacagcggccactgccccgacggctacatctgcctgaagaccagcgacaaccccgacttcaactacaccagcttcgacagcttcgcctgggccttcctgagcctgttcagactgatgacccaggacagctgggagagactgtaccagcagaccctgagaaccagcggcaagatctacatgatcttcttcgtgctggtgatcttcctgggcagcttctacctggtgaacctgatcctggccgtggtgaccatggcctacgaggagcagaaccaggccaccaccgacgagatcgaggccaaggagaagaagttccaggaggccctggagatgctgagaaaggagcaggaggtgctggccgccctgggcatcgacaccaccagcctgcacagccacaacggcagccccctgaccagcaagaacgccagcgagagaagacacagaatcaagcccagagtgagcgagggcagcaccgaggacaacaagagccccagaagcgacccctacaaccagagaagaatgagcttcctgggcctggccagcggcaagagaagagccagccacggcagcgtgttccacttcagaagccccggcagagacatcagcctgcccgagggcgtgaccgacgacggcgtgttccccggcgaccacgagagccacagaggcagcctgctgctgggcggcggcgccggccagcagggccccctgcccagaagccccctgccccagcccagcaaccccgacagcagacacggcgaggacgagcaccagcccccccccaccagcgagctggcccccggcgccgtggacgtgagcgccttcgacgccggccagaagaagaccttcctgagcgccgagtacctggacgagcccttcagagcccagagagccatgagcgtggtgagcatcatcaccagcgtgctggaggagctggaggagagcgagcagaagtgccccccctgcctgaccagcctgagccagaagtacctgatctgggactgctgccccatgtgggtgaagctgaagaccatcctgttcggcctggtgaccgaccccttcgccgagctgaccatcaccctgtgcatcgtggtgaacaccatcttcatggccatggagcaccacggcatgagccccaccttcgaggccatgctgcagatcggcaacatcgtgttcaccatcttcttcaccgccgagatggtgttcaagatcatcgccttcgacccctactactacttccagaagaagtggaacatcttcgactgcatcatcgtgaccgtgagcctgctggagctgggcgtggccaagaagggcagcctgagcgtgctgagaagcttcagactgctgagagtgttcaagctggccaagagctggcccaccctgaacaccctgatcaagatcatcggcaacagcgtgggcgccctgggcaacctgaccatcatcctggccatcatcgtgttcgtgttcgccctggtgggcaagcagctgctgggcgagaactacagaaacaacagaaagaacatcagcgccccccacgaggactggcccagatggcacatgcacgacttcttccacagcttcctgatcgtgttcagaatcctgtgcggcgagtggatcgagaacatgtgggcctgcatggaggtgggccagaagagcatctgcctgatcctgttcctgaccgtgatggtgctgggcaacctggtggtgctgaacctgttcatcgccctgctgctgaacagcttcagcgccgacaacctgaccgcccccgaggacgacggcgaggtgaacaacctgcaggtggccctggccagaatccaggtgttcggccacagaaccaagcaggccctgtgcagcttcttcagcagaagctgccccttcccccagcccaaggccgagcccgagctggtggtgaagctgcccctgagcagcagcaaggccgagaaccacatcgccgccaacaccgccagaggcagcagcggcggcctgcaggcccccagaggccccagagacgagcacagcgacttcatcgccaaccccaccgtgtgggtgagcgtgcccatcgccgagggcgagagcgacctggacgacctggaggacgacggcggcgaggacgcccagagcttccagcaggaggtgatccccaagggccagcaggagcagctgcagcaggtggagagatgcggcgaccacctgacccccagaagccccggcaccggcaccagcagcgaggacctggcccccagcctgggcgagacctggaaggacgagagcgtgccccaggtgcccgccgagggcgtggacgacaccagcagcagcgagggcagcaccgtggactgcctggaccccgaggagatcctgagaaagatccccgagctggccgacgacctggaggagcccgacgactgcttcaccgagggctgcatcagacactgcccctgctgcaagctggacaccaccaagagcccctgggacgtgggctggcaggtgagaaagacctgctacagaatcgtggagcacagctggttcgagagcttcatcatcttcatgatcctgctgagcagcggcagcctggccttcgaggactactacctggaccagaagcccaccgtgaaggccctgctggagtacaccgacagagtgttcaccttcatcttcgtgttcgagatgctgctgaagtgggtggcctacggcttcaagaagtacttcaccaacgcctggtgctggctggacttcctgatcgtgaacatcagcctgatcagcctgaccgccaagatcctggagtacagcgaggtggcccccatcaaggccctgagaaccctgagagccctgagacccctgagagccctgagcagattcgagggcatgagagtggtggtggacgccctggtgggcgccatccccagcatcatgaacgtgctgctggtgtgcctgatcttctggctgatcttcagcatcatgggcgtgaacctgttcgccggcaagttctggagatgcatcaactacaccgacggcgagttcagcctggtgcccctgagcatcgtgaacaacaagagcgactgcaagatccagaacagcaccggcagcttcttctgggtgaacgtgaaggtgaacttcgacaacgtggccatgggctacctggccctgctgcaggtggccaccttcaagggctggatggacatcatgtacgccgccgtggacagcagagaggtgaacatgcagcccaagtgggaggacaacgtgtacatgtacctgtacttcgtgatcttcatcatcttcggcggcttcttcaccctgaacctgttcgtgggcgtgatcatcgacaacttcaaccagcagaagaagaagctgggcggccaggacatcttcatgaccgaggagcagaagaagtactacaacgccatgaagaagctgggcagcaagaagccccagaagcccatccccagacccctgaacaagttccagggcttcgtgttcgacatcgtgaccagacaggccttcgacatcaccatcatggtgctgatctgcctgaacatgatcaccatgatggtggagaccgacgaccagagcgaggagaagaccaagatcctgggcaagatcaaccagttcttcgtggccgtgttcaccggcgagtgcgtgatgaagatgttcgccctgagacagtactacttcaccaacggctggaacgtgttcgacttcatcgtggtggtgctgagcatcgccagcctgatcttcagcgccatcctgaagagcctgcagagctacttcagccccaccctgttcagagtgatcagactggccagaatcggcagaatcctgagactgatcagagccgccaagggcatcagaaccctgctgttcgccctgatgatgagcctgcccgccctgttcaacatcggcctgctgctgttcctggtgatgttcatctacagcatcttcggcatgagcagcttcccccacgtgagatgggaggccggcatcgacgacatgttcaacttccagaccttcgccaacagcatgctgtgcctgttccagatcaccaccagcgccggctgggacggcctgctgagccccatcctgaacaccggccccccctactgcgaccccaacctgcccaacagcaacggcaccagaggcgactgcggcagccccgccgtgggcatcatcttcttcaccacctacatcatcatcagcttcctgatcatggtgaacatgtacatcgccgtgatcctggagaacttcaacgtggccaccgaggagagcaccgagcccctgagcgaggacgacttcgacatgttctacgagacctgggagaagttcgaccccgaggccacccagttcatcaccttcagcgccctgagcgacttcgccgacaccctgagcggccccctgagaatccccaagcccaacagaaacatcctgatccagatggacctgcccctggtgcccggcgacaagatccactgcctggacatcctgttcgccttcaccaagaacgtgctgggcgagagcggcgagctggacagcctgaaggccaacatggaggagaagttcatggccaccaacctgagcaagagcagctacgagcccatcgccaccaccctgagatggaagcaggaggacatcagcgccaccgtgatccagaaggcctacagaagctacgtgctgcacagaagcatggccctgagcaacaccccctgcgtgcccagagccgaggaggaggccgccagcctgcccgacgagggcttcgtggccttcaccgccaacgagaactgcgtgctgcccgacaagagcgagaccgccagcgccaccagcttcccccccagctacgagagcgtgaccagaggcctgagcgacagagtgaacatgagaaccagcagcagcatccagaacgaggacgaggccaccagcatggagctgatcgcccccggcccc

SEQ ID NO: 22 - protein, 218 aa, Artificial Sequence
  hNav-beta1 subunit
MGRLLALVVGAALVSSACGGCVEVDSETEAVYGMTFKILCISCKRRSETNAETFTEWTFRQKGTEEFVKILRYENEVLQLEEDERFEGRVVWNGSRGTKDLQDLSIFITNVTYNHSGDYECHVYRLLFFENYEHNTSVVKKIHIEVVDKANRDMASIVSEIMMYVLIVVLTIWLVAEMIYCYKKIAAATETAAQENASEYLAITSESKENCTGVQVAE

SEQ ID NO: 23 - DNA, 654 bp, Artificial Sequence
  Polynucleotide encoding hNav-beta1 subunit
atggggaggctgctggccttagtggtcggcgcggcactggtgtcctcagcctgcgggggctgcgtggaggtggactcggagaccgaggccgtgtatgggatgaccttcaaaattctttgcatctcctgcaagcgccgcagcgagaccaacgctgagaccttcaccgagtggaccttccgccagaagggcactgaggagtttgtcaagatcctgcgctatgagaatgaggtgttgcagctggaggaggatgagcgcttcgagggccgcgtggtgtggaatggcagccggggcaccaaagacctgcaggatctgtctatcttcatcaccaatgtcacctacaaccactcgggcgactacgagtgccacgtctaccgcctgctcttcttcgaaaactacgagcacaacaccagcgtcgtcaagaagatccacattgaggtagtggacaaagccaacagagacatggcatccatcgtgtctgagatcatgatgtatgtgctcattgtggtgttgaccatatggctcgtggcagagatgatttactgctacaagaagatcgctgccgccacggagactgctgcacaggagaatgcctcggaatacctggccatcacctctgaaagcaaagagaactgcacgggcgtccaggtggccgaa

SEQ ID NO: 24 - protein, 215 aa, Artificial Sequence
  hNavBeta2 subunit
MHRDAWLPRPAFSLTGLSLFFSLVPPGRSMEVTVPATLNVLNGSDARLPCTFNSCYTVNHKQFSLNWTYQECNNCSEEMFLQFRMKIINLKLERFQDRVEFSGNPSKYDVSVMLRNVQPEDEGIYNCYIMNPPDRHRGHGKIHLQVLMEEPPERDSTVAVIVGASVGGFLAVVILVLMVVKCVRRKKEQKLSTDDLKTEEEGKTDGEGNPDDGAK

SEQ ID NO: 25 - DNA, 645 bp, Artificial Sequence
  Polynucleotide encoding hNavBeta2 subunit
atgcacagagatgcctggctacctcgccctgccttcagcctcacggggctcagtctctttttctctttggtgccaccaggacggagcatggaggtcacagtacctgccaccctcaacgtcctcaatggctctgacgcccgcctgccctgcaccttcaactcctgctacacagtgaaccacaaacagttctccctgaactggacttaccaggagtgcaacaactgctctgaggagatgttcctccagttccgcatgaagatcattaacctgaagctggagcggtttcaagaccgcgtggagttctcagggaaccccagcaagtacgatgtgtcggtgatgctgagaaacgtgcagccggaggatgaggggatttacaactgctacatcatgaacccccctgaccgccaccgtggccatggcaagatccatctgcaggtcctcatggaagagccccctgagcgggactccacggtggccgtgattgtgggtgcctccgtcgggggcttcctggctgtggtcatcttggtgctgatggtggtcaagtgtgtgaggagaaaaaaagagcagaagctgagcacagatgacctgaagaccgaggaggagggcaagacggacggtgaaggcaacccggatgatggcgccaag

SEQ ID NO: 26 - protein, 215 aa, Artificial Sequence
  hNav-beta3 subunit
MPAFNRLFPLASLVLIYWVSVCFPVCVEVPSETEAVQGNPMKLRCISCMKREEVEATTVVEWFYRPEGGKDFLIYEYRNGHQEVESPFQGRLQWNGSKDLQDVSITVLNVTLNDSGLYTCNVSREFEFEAHRPFVKTTRLIPLRVTEEAGEDFTSVVSEIMMYILLVFLTLWLLIEMIYCYRKVSKAEEAAQENASDYLAIPSENKENSAVPVEE

SEQ ID NO: 27 - DNA, 648 bp, Artificial Sequence
  Polynucleotide encoding hNav-beta3 subunit
atgcctgccttcaatagattgtttcccctggcttctctcgtgcttatctactgggtcagtgtctgcttccctgtgtgtgtggaagtgccctcggagacggaggccgtgcagggcaaccccatgaagctgcgctgcatctcctgcatgaagagagaggaggtggaggccaccacggtggtggaatggttctacaggcccgagggcggtaaagatttccttatttacgagtatcggaatggccaccaggaggtggagagcccctttcaggggcgcctgcagtggaatggcagcaaggacctgcaggacgtgtccatcactgtgctcaacgtcactctgaacgactctggcctctacacctgcaatgtgtcccgggagtttgagtttgaggcgcatcggccctttgtgaagacgacgcggctgatccccctaagagtcaccgaggaggctggagaggacttcacctctgtggtctcagaaatcatgatgtacatccttctggtcttcctcaccttgtggctgctcatcgagatgatatattgctacagaaaggtctcaaaagccgaagaggcagcccaagaaaacgcgtctgactaccttgccatcccatctgagaacaaggagaactctgcggtaccagtggaggaatag

SEQ ID NO: 28 - protein, 240 aa, Artificial Sequence
  P2A+hNavBeta1
GSGATNFSLLKQAGDVEENPGPMGRLLALVVGAALVSSACGGCVEVDSETEAVYGMTFKILCISCKRRSETNAETFTEWTFRQKGTEEFVKILRYENEVLQLEEDERFEGRVVWNGSRGTKDLQDLSIFITNVTYNHSGDYECHVYRLLFFENYEHNTSVVKKIHIEVVDKANRDMASIVSEIMMYVLIVVLTIWLVAEMIYCYKKIAAATETAAQENASEYLAITSESKENCTGVQVAE

SEQ ID NO: 29 - DNA, 720 bp, Artificial Sequence
  Polynucleotide encoding P2A+hNavBeta1
ggaagcggagctactaacttcagcctgctgaagcaggctggagacgtggaggagaaccctggacctatggggaggctgctggccttagtggtcggcgcggcactggtgtcctcagcctgcgggggctgcgtggaggtggactcggagaccgaggccgtgtatgggatgaccttcaaaattctttgcatctcctgcaagcgccgcagcgagaccaacgctgagaccttcaccgagtggaccttccgccagaagggcactgaggagtttgtcaagatcctgcgctatgagaatgaggtgttgcagctggaggaggatgagcgcttcgagggccgcgtggtgtggaatggcagccggggcaccaaagacctgcaggatctgtctatcttcatcaccaatgtcacctacaaccactcgggcgactacgagtgccacgtctaccgcctgctcttcttcgaaaactacgagcacaacaccagcgtcgtcaagaagatccacattgaggtagtggacaaagccaacagagacatggcatccatcgtgtctgagatcatgatgtatgtgctcattgtggtgttgaccatatggctcgtggcagagatgatttactgctacaagaagatcgctgccgccacggagactgctgcacaggagaatgcctcggaatacctggccatcacctctgaaagcaaagagaactgcacgggcgtccaggtggccgaa

SEQ ID NO: 30 - protein, 477 aa, Artificial Sequence
  P2A+hNavBeta1+P2A+hNavBeta2
GSGATNFSLLKQAGDVEENPGPMGRLLALVVGAALVSSACGGCVEVDSETEAVYGMTFKILCISCKRRSETNAETFTEWTFRQKGTEEFVKILRYENEVLQLEEDERFEGRVVWNGSRGTKDLQDLSIFITNVTYNHSGDYECHVYRLLFFENYEHNTSVVKKIHIEVVDKANRDMASIVSEIMMYVLIVVLTIWLVAEMIYCYKKIAAATETAAQENASEYLAITSESKENCTGVQVAEGSGATNFSLLKQAGDVEENPGPMHRDAWLPRPAFSLTGLSLFFSLVPPGRSMEVTVPATLNVLNGSDARLPCTFNSCYTVNHKQFSLNWTYQECNNCSEEMFLQFRMKIINLKLERFQDRVEFSGNPSKYDVSVMLRNVQPEDEGIYNCYIMNPPDRHRGHGKIHLQVLMEEPPERDSTVAVIVGASVGGFLAVVILVLMVVKCVRRKKEQKLSTDDLKTEEEGKTDGEGNPDDGAK

SEQ ID NO: 31 - DNA, 1431 bp, Artificial Sequence
  Polynucleotide encoding P2A+hNavBeta1+PSA+hNavBeta2
ggaagcggagctactaacttcagcctgctgaagcaggctggagacgtggaggagaaccctggacctatggggaggctgctggccttagtggtcggcgcggcactggtgtcctcagcctgcgggggctgcgtggaggtggactcggagaccgaggccgtgtatgggatgaccttcaaaattctttgcatctcctgcaagcgccgcagcgagaccaacgctgagaccttcaccgagtggaccttccgccagaagggcactgaggagtttgtcaagatcctgcgctatgagaatgaggtgttgcagctggaggaggatgagcgcttcgagggccgcgtggtgtggaatggcagccggggcaccaaagacctgcaggatctgtctatcttcatcaccaatgtcacctacaaccactcgggcgactacgagtgccacgtctaccgcctgctcttcttcgaaaactacgagcacaacaccagcgtcgtcaagaagatccacattgaggtagtggacaaagccaacagagacatggcatccatcgtgtctgagatcatgatgtatgtgctcattgtggtgttgaccatatggctcgtggcagagatgatttactgctacaagaagatcgctgccgccacggagactgctgcacaggagaatgcctcggaatacctggccatcacctctgaaagcaaagagaactgcacgggcgtccaggtggccgaaggaagcggagctactaacttcagcctgctgaagcaggctggagacgtggaggagaaccctggacctatgcacagagatgcctggctacctcgccctgccttcagcctcacggggctcagtctctttttctctttggtgccaccaggacggagcatggaggtcacagtacctgccaccctcaacgtcctcaatggctctgacgcccgcctgccctgcaccttcaactcctgctacacagtgaaccacaaacagttctccctgaactggacttaccaggagtgcaacaactgctctgaggagatgttcctccagttccgcatgaagatcattaacctgaagctggagcggtttcaagaccgcgtggagttctcagggaaccccagcaagtacgatgtgtcggtgatgctgagaaacgtgcagccggaggatgaggggatttacaactgctacatcatgaacccccctgaccgccaccgtggccatggcaagatccatctgcaggtcctcatggaagagccccctgagcgggactccacggtggccgtgattgtgggtgcctccgtcgggggcttcctggctgtggtcatcttggtgctgatggtggtcaagtgtgtgaggagaaaaaaagagcagaagctgagcacagatgacctgaagaccgaggaggagggcaagacggacggtgaaggcaacccggatgatggcgccaag

SEQ ID NO: 32 - protein, 714 aa, Artificial Sequence
  P2A+hNavBeta1+P2A+hNavBeta2+P2A+hNavBeta3
GSGATNFSLLKQAGDVEENPGPMGRLLALVVGAALVSSACGGCVEVDSETEAVYGMTFKILCISCKRRSETNAETFTEWTFRQKGTEEFVKILRYENEVLQLEEDERFEGRVVWNGSRGTKDLQDLSIFITNVTYNHSGDYECHVYRLLFFENYEHNTSVVKKIHIEVVDKANRDMASIVSEIMMYVLIVVLTIWLVAEMIYCYKKIAAATETAAQENASEYLAITSESKENCTGVQVAEGSGATNFSLLKQAGDVEENPGPMHRDAWLPRPAFSLTGLSLFFSLVPPGRSMEVTVPATLNVLNGSDARLPCTFNSCYTVNHKQFSLNWTYQECNNCSEEMFLQFRMKIINLKLERFQDRVEFSGNPSKYDVSVMLRNVQPEDEGIYNCYIMNPPDRHRGHGKIHLQVLMEEPPERDSTVAVIVGASVGGFLAVVILVLMVVKCVRRKKEQKLSTDDLKTEEEGKTDGEGNPDDGAKGSGATNFSLLKQAGDVEENPGPMPAFNRLFPLASLVLIYWVSVCFPVCVEVPSETEAVQGNPMKLRCISCMKREEVEATTVVEWFYRPEGGKDFLIYEYRNGHQEVESPFQGRLQWNGSKDLQDVSITVLNVTLNDSGLYTCNVSREFEFEAHRPFVKTTRLIPLRVTEEAGEDFTSVVSEIMMYILLVFLTLWLLIEMIYCYRKVSKAEEAAQENASDYLAIPSENKENSAVPVEE

SEQ ID NO: 33 - DNA, 2145 bp, Artificial Sequence
  Polynucleotide encoding P2A+hNavBeta1+P2A+hNavBeta2+P2A+hNavBeta3
ggaagcggagctactaacttcagcctgctgaagcaggctggagacgtggaggagaaccctggacctatggggaggctgctggccttagtggtcggcgcggcactggtgtcctcagcctgcgggggctgcgtggaggtggactcggagaccgaggccgtgtatgggatgaccttcaaaattctttgcatctcctgcaagcgccgcagcgagaccaacgctgagaccttcaccgagtggaccttccgccagaagggcactgaggagtttgtcaagatcctgcgctatgagaatgaggtgttgcagctggaggaggatgagcgcttcgagggccgcgtggtgtggaatggcagccggggcaccaaagacctgcaggatctgtctatcttcatcaccaatgtcacctacaaccactcgggcgactacgagtgccacgtctaccgcctgctcttcttcgaaaactacgagcacaacaccagcgtcgtcaagaagatccacattgaggtagtggacaaagccaacagagacatggcatccatcgtgtctgagatcatgatgtatgtgctcattgtggtgttgaccatatggctcgtggcagagatgatttactgctacaagaagatcgctgccgccacggagactgctgcacaggagaatgcctcggaatacctggccatcacctctgaaagcaaagagaactgcacgggcgtccaggtggccgaaggaagcggagctactaacttcagcctgctgaagcaggctggagacgtggaggagaaccctggacctatgcacagagatgcctggctacctcgccctgccttcagcctcacggggctcagtctctttttctctttggtgccaccaggacggagcatggaggtcacagtacctgccaccctcaacgtcctcaatggctctgacgcccgcctgccctgcaccttcaactcctgctacacagtgaaccacaaacagttctccctgaactggacttaccaggagtgcaacaactgctctgaggagatgttcctccagttccgcatgaagatcattaacctgaagctggagcggtttcaagaccgcgtggagttctcagggaaccccagcaagtacgatgtgtcggtgatgctgagaaacgtgcagccggaggatgaggggatttacaactgctacatcatgaacccccctgaccgccaccgtggccatggcaagatccatctgcaggtcctcatggaagagccccctgagcgggactccacggtggccgtgattgtgggtgcctccgtcgggggcttcctggctgtggtcatcttggtgctgatggtggtcaagtgtgtgaggagaaaaaaagagcagaagctgagcacagatgacctgaagaccgaggaggagggcaagacggacggtgaaggcaacccggatgatggcgccaagggaagcggagctactaacttcagcctgctgaagcaggctggagacgtggaggagaaccctggacctatgcctgccttcaatagattgtttcccctggcttctctcgtgcttatctactgggtcagtgtctgcttccctgtgtgtgtggaagtgccctcggagacggaggccgtgcagggcaaccccatgaagctgcgctgcatctcctgcatgaagagagaggaggtggaggccaccacggtggtggaatggttctacaggcccgagggcggtaaagatttccttatttacgagtatcggaatggccaccaggaggtggagagcccctttcaggggcgcctgcagtggaatggcagcaaggacctgcaggacgtgtccatcactgtgctcaacgtcactctgaacgactctggcctctacacctgcaatgtgtcccgggagtttgagtttgaggcgcatcggccctttgtgaagacgacgcggctgatccccctaagagtcaccgaggaggctggagaggacttcacctctgtggtctcagaaatcatgatgtacatccttctggtcttcctcaccttgtggctgctcatcgagatgatatattgctacagaaaggtctcaaaagccgaagaggcagcccaagaaaacgcgtctgactaccttgccatcccatctgagaacaaggagaactctgcggtaccagtggaggaatag

SEQ ID NO: 34 - protein, 2249 aa, Artificial Sequence
  hNav1.1+P2A+hNavBeta1
MEQTVLVPPGPDSFNFFTRESLAAIERRIAEEKAKNPKPDKKDDDENGPKPNSDLEAGKNLPFIYGDIPPEMVSEPLEDLDPYYINKKTFIVLNKGKAIFRFSATSALYILTPFNPLRKIAIKILVHSLFSMLIMCTILTNCVFMTMSNPPDWTKNVEYTFTGIYTFESLIKIIARGFCLEDFTFLRDPWNWLDFTVITFAYVTEFVDLGNVSALRTFRVLRALKTISVIPGLKTIVGALIQSVKKLSDVMILTVFCLSVFALIGLQLFMGNLRNKCIQWPPTNASLEEHSIEKNITVNYNGTLINETVFEFDWKSYIQDSRYHYFLEGFLDALLCGNSSDAGQCPEGYMCVKAGRNPNYGYTSFDTFSWAFLSLFRLMTQDFWENLYQLTLRAAGKTYMIFFVLVIFLGSFYLINLILAVVAMAYEEQNQATLEEAEQKEAEFQQMIEQLKKQQEAAQQAATATASEHSREPSAAGRLSDSSSEASKLSSKSAKERRNRRKKRKQKEQSGGEEKDEDEFQKSESEDSIRRKGFRFSIEGNRLTYEKRYSSPHQSLLSIRGSLFSPRRNSRTSLFSFRGRAKDVGSENDFADDEHSTFEDNESRRDSLFVPRRHGERRNSNLSQTSRSSRMLAVFPANGKMHSTVDCNGVVSLVGGPSVPTSPVGQLLPEVIIDKPATDDNGTTTETEMRKRRSSSFHVSMDFLEDPSQRQRAMSIASILTNTVEELEESRQKCPPCWYKFSNIFLIWDCSPYWLKVKHVVNLVVMDPFVDLAITICIVLNTLFMAMEHYPMTDHFNNVLTVGNLVFTGIFTAEMFLKIIAMDPYYYFQEGWNIFDGFIVTLSLVELGLANVEGLSVLRSFRLLRVFKLAKSWPTLNMLIKIIGNSVGALGNLTLVLAIIVFIFAVVGMQLFGKSYKDCVCKIASDCQLPRWHMNDFFHSFLIVFRVLCGEWIETMWDCMEVAGQAMCLTVFMMVMVIGNLVVLNLFLALLLSSFSADNLAATDDDNEMNNLQIAVDRMHKGVAYVKRKIYEFIQQSFIRKQKILDEIKPLDDLNNKKDSCMSNHTAEIGKDLDYLKDVNGTTSGIGTGSSVEKYIIDESDYMSFINNPSLTVTVPIAVGESDFENLNTEDFSSESDLEESKEKLNESSSSSEGSTVDIGAPVEEQPVVEPEETLEPEACFTEGCVQRFKCCQINVEEGRGKQWWNLRRTCFRIVEHNWFETFIVFMILLSSGALAFEDIYIDQRKTIKTMLEYADKVFTYIFILEMLLKWVAYGYQTYFTNAWCWLDFLIVDVSLVSLTANALGYSELGAIKSLRTLRALRPLRALSRFEGMRVVVNALLGAIPSIMNVLLVCLIFWLIFSIMGVNLFAGKFYHCINTTTGDRFDIEDVNNHTDCLKLIERNETARWKNVKVNFDNVGFGYLSLLQVATFKGWMDIMYAAVDSRNVELQPKYEESLYMYLYFVIFIIFGSFFTLNLFIGVIIDNFNQQKKKFGGQDIFMTEEQKKYYNAMKKLGSKKPQKPIPRPGNKFQGMVFDFVTRQVFDISIMILICLNMVTMMVETDDQSEYVTTILSRINLVFIVLFTGECVLKLISLRHYYFTIGWNIFDFVVVILSIVGMFLAELIEKYFVSPTLFRVIRLARIGRILRLIKGAKGIRTLLFALMMSLPALFNIGLLLFLVMFIYAIFGMSNFAYVKREVGIDDMFNFETFGNSMICLFQITTSAGWDGLLAPILNSKPPDCDPNKVNPGSSVKGDCGNPSVGIFFFVSYIIISFLVVVNMYIAVILENFSVATEESAEPLSEDDFEMFYEVWEKFDPDATQFMEFEKLSQFAAALEPPLNLPQPNKLQLIAMDLPMVSGDRIHCLDILFAFTKRVLGESGEMDALRIQMEERFMASNPSKVSYQPITTTLKRKQEEVSAVIIQRAYRRHLLKRTVKQASFTYNKNKIKGGANLLIKEDMIIDRINENSITEKTDLTMSTAACPPSYDRVTKPIVEKHEQEGKDEKAKGKGSGATNFSLLKQAGDVEENPGPMGRLLALVVGAALVSSACGGCVEVDSETEAVYGMTFKILCISCKRRSETNAETFTEWTFRQKGTEEFVKILRYENEVLQLEEDERFEGRVVWNGSRGTKDLQDLSIFITNVTYNHSGDYECHVYRLLFFENYEHNTSVVKKIHIEVVDKANRDMASIVSEIMMYVLIVVLTIWLVAEMIYCYKKIAAATETAAQENASEYLAITSESKENCTGVQVAE

SEQ ID NO: 35 - protein, 2486 aa, Artificial Sequence
  hNav1.1+P2A+hNavBeta1+P2A+hNavBeta2
MEQTVLVPPGPDSFNFFTRESLAAIERRIAEEKAKNPKPDKKDDDENGPKPNSDLEAGKNLPFIYGDIPPEMVSEPLEDLDPYYINKKTFIVLNKGKAIFRFSATSALYILTPFNPLRKIAIKILVHSLFSMLIMCTILTNCVFMTMSNPPDWTKNVEYTFTGIYTFESLIKIIARGFCLEDFTFLRDPWNWLDFTVITFAYVTEFVDLGNVSALRTFRVLRALKTISVIPGLKTIVGALIQSVKKLSDVMILTVFCLSVFALIGLQLFMGNLRNKCIQWPPTNASLEEHSIEKNITVNYNGTLINETVFEFDWKSYIQDSRYHYFLEGFLDALLCGNSSDAGQCPEGYMCVKAGRNPNYGYTSFDTFSWAFLSLFRLMTQDFWENLYQLTLRAAGKTYMIFFVLVIFLGSFYLINLILAVVAMAYEEQNQATLEEAEQKEAEFQQMIEQLKKQQEAAQQAATATASEHSREPSAAGRLSDSSSEASKLSSKSAKERRNRRKKRKQKEQSGGEEKDEDEFQKSESEDSIRRKGFRFSIEGNRLTYEKRYSSPHQSLLSIRGSLFSPRRNSRTSLFSFRGRAKDVGSENDFADDEHSTFEDNESRRDSLFVPRRHGERRNSNLSQTSRSSRMLAVFPANGKMHSTVDCNGVVSLVGGPSVPTSPVGQLLPEVIIDKPATDDNGTTTETEMRKRRSSSFHVSMDFLEDPSQRQRAMSIASILTNTVEELEESRQKCPPCWYKFSNIFLIWDCSPYWLKVKHVVNLVVMDPFVDLAITICIVLNTLFMAMEHYPMTDHFNNVLTVGNLVFTGIFTAEMFLKIIAMDPYYYFQEGWNIFDGFIVTLSLVELGLANVEGLSVLRSFRLLRVFKLAKSWPTLNMLIKIIGNSVGALGNLTLVLAIIVFIFAVVGMQLFGKSYKDCVCKIASDCQLPRWHMNDFFHSFLIVFRVLCGEWIETMWDCMEVAGQAMCLTVFMMVMVIGNLVVLNLFLALLLSSFSADNLAATDDDNEMNNLQIAVDRMHKGVAYVKRKIYEFIQQSFIRKQKILDEIKPLDDLNNKKDSCMSNHTAEIGKDLDYLKDVNGTTSGIGTGSSVEKYIIDESDYMSFINNPSLTVTVPIAVGESDFENLNTEDFSSESDLEESKEKLNESSSSSEGSTVDIGAPVEEQPVVEPEETLEPEACFTEGCVQRFKCCQINVEEGRGKQWWNLRRTCFRIVEHNWFETFIVFMILLSSGALAFEDIYIDQRKTIKTMLEYADKVFTYIFILEMLLKWVAYGYQTYFTNAWCWLDFLIVDVSLVSLTANALGYSELGAIKSLRTLRALRPLRALSRFEGMRVVVNALLGAIPSIMNVLLVCLIFWLIFSIMGVNLFAGKFYHCINTTTGDRFDIEDVNNHTDCLKLIERNETARWKNVKVNFDNVGFGYLSLLQVATFKGWMDIMYAAVDSRNVELQPKYEESLYMYLYFVIFIIFGSFFTLNLFIGVIIDNFNQQKKKFGGQDIFMTEEQKKYYNAMKKLGSKKPQKPIPRPGNKFQGMVFDFVTRQVFDISIMILICLNMVTMMVETDDQSEYVTTILSRINLVFIVLFTGECVLKLISLRHYYFTIGWNIFDFVVVILSIVGMFLAELIEKYFVSPTLFRVIRLARIGRILRLIKGAKGIRTLLFALMMSLPALFNIGLLLFLVMFIYAIFGMSNFAYVKREVGIDDMFNFETFGNSMICLFQITTSAGWDGLLAPILNSKPPDCDPNKVNPGSSVKGDCGNPSVGIFFFVSYIIISFLVVVNMYIAVILENFSVATEESAEPLSEDDFEMFYEVWEKFDPDATQFMEFEKLSQFAAALEPPLNLPQPNKLQLIAMDLPMVSGDRIHCLDILFAFTKRVLGESGEMDALRIQMEERFMASNPSKVSYQPITTTLKRKQEEVSAVIIQRAYRRHLLKRTVKQASFTYNKNKIKGGANLLIKEDMIIDRINENSITEKTDLTMSTAACPPSYDRVTKPIVEKHEQEGKDEKAKGKGSGATNFSLLKQAGDVEENPGPMGRLLALVVGAALVSSACGGCVEVDSETEAVYGMTFKILCISCKRRSETNAETFTEWTFRQKGTEEFVKILRYENEVLQLEEDERFEGRVVWNGSRGTKDLQDLSIFITNVTYNHSGDYECHVYRLLFFENYEHNTSVVKKIHIEVVDKANRDMASIVSEIMMYVLIVVLTIWLVAEMIYCYKKIAAATETAAQENASEYLAITSESKENCTGVQVAEGSGATNFSLLKQAGDVEENPGPMHRDAWLPRPAFSLTGLSLFFSLVPPGRSMEVTVPATLNVLNGSDARLPCTFNSCYTVNHKQFSLNWTYQECNNCSEEMFLQFRMKIINLKLERFQDRVEFSGNPSKYDVSVMLRNVQPEDEGIYNCYIMNPPDRHRGHGKIHLQVLMEEPPERDSTVAVIVGASVGGFLAVVILVLMVVKCVRRKKEQKLSTDDLKTEEEGKTDGEGNPDDGAK

SEQ ID NO: 36 - protein, 2723 aa, Artificial Sequence
  hNav1.1+P2A+hNavBeta1+P2A+hNavBeta2+P2A+hNavBeta3
MEQTVLVPPGPDSFNFFTRESLAAIERRIAEEKAKNPKPDKKDDDENGPKPNSDLEAGKNLPFIYGDIPPEMVSEPLEDLDPYYINKKTFIVLNKGKAIFRFSATSALYILTPFNPLRKIAIKILVHSLFSMLIMCTILTNCVFMTMSNPPDWTKNVEYTFTGIYTFESLIKIIARGFCLEDFTFLRDPWNWLDFTVITFAYVTEFVDLGNVSALRTFRVLRALKTISVIPGLKTIVGALIQSVKKLSDVMILTVFCLSVFALIGLQLFMGNLRNKCIQWPPTNASLEEHSIEKNITVNYNGTLINETVFEFDWKSYIQDSRYHYFLEGFLDALLCGNSSDAGQCPEGYMCVKAGRNPNYGYTSFDTFSWAFLSLFRLMTQDFWENLYQLTLRAAGKTYMIFFVLVIFLGSFYLINLILAVVAMAYEEQNQATLEEAEQKEAEFQQMIEQLKKQQEAAQQAATATASEHSREPSAAGRLSDSSSEASKLSSKSAKERRNRRKKRKQKEQSGGEEKDEDEFQKSESEDSIRRKGFRFSIEGNRLTYEKRYSSPHQSLLSIRGSLFSPRRNSRTSLFSFRGRAKDVGSENDFADDEHSTFEDNESRRDSLFVPRRHGERRNSNLSQTSRSSRMLAVFPANGKMHSTVDCNGVVSLVGGPSVPTSPVGQLLPEVIIDKPATDDNGTTTETEMRKRRSSSFHVSMDFLEDPSQRQRAMSIASILTNTVEELEESRQKCPPCWYKFSNIFLIWDCSPYWLKVKHVVNLVVMDPFVDLAITICIVLNTLFMAMEHYPMTDHFNNVLTVGNLVFTGIFTAEMFLKIIAMDPYYYFQEGWNIFDGFIVTLSLVELGLANVEGLSVLRSFRLLRVFKLAKSWPTLNMLIKIIGNSVGALGNLTLVLAIIVFIFAVVGMQLFGKSYKDCVCKIASDCQLPRWHMNDFFHSFLIVFRVLCGEWIETMWDCMEVAGQAMCLTVFMMVMVIGNLVVLNLFLALLLSSFSADNLAATDDDNEMNNLQIAVDRMHKGVAYVKRKIYEFIQQSFIRKQKILDEIKPLDDLNNKKDSCMSNHTAEIGKDLDYLKDVNGTTSGIGTGSSVEKYIIDESDYMSFINNPSLTVTVPIAVGESDFENLNTEDFSSESDLEESKEKLNESSSSSEGSTVDIGAPVEEQPVVEPEETLEPEACFTEGCVQRFKCCQINVEEGRGKQWWNLRRTCFRIVEHNWFETFIVFMILLSSGALAFEDIYIDQRKTIKTMLEYADKVFTYIFILEMLLKWVAYGYQTYFTNAWCWLDFLIVDVSLVSLTANALGYSELGAIKSLRTLRALRPLRALSRFEGMRVVVNALLGAIPSIMNVLLVCLIFWLIFSIMGVNLFAGKFYHCINTTTGDRFDIEDVNNHTDCLKLIERNETARWKNVKVNFDNVGFGYLSLLQVATFKGWMDIMYAAVDSRNVELQPKYEESLYMYLYFVIFIIFGSFFTLNLFIGVIIDNFNQQKKKFGGQDIFMTEEQKKYYNAMKKLGSKKPQKPIPRPGNKFQGMVFDFVTRQVFDISIMILICLNMVTMMVETDDQSEYVTTILSRINLVFIVLFTGECVLKLISLRHYYFTIGWNIFDFVVVILSIVGMFLAELIEKYFVSPTLFRVIRLARIGRILRLIKGAKGIRTLLFALMMSLPALFNIGLLLFLVMFIYAIFGMSNFAYVKREVGIDDMFNFETFGNSMICLFQITTSAGWDGLLAPILNSKPPDCDPNKVNPGSSVKGDCGNPSVGIFFFVSYIIISFLVVVNMYIAVILENFSVATEESAEPLSEDDFEMFYEVWEKFDPDATQFMEFEKLSQFAAALEPPLNLPQPNKLQLIAMDLPMVSGDRIHCLDILFAFTKRVLGESGEMDALRIQMEERFMASNPSKVSYQPITTTLKRKQEEVSAVIIQRAYRRHLLKRTVKQASFTYNKNKIKGGANLLIKEDMIIDRINENSITEKTDLTMSTAACPPSYDRVTKPIVEKHEQEGKDEKAKGKGSGATNFSLLKQAGDVEENPGPMGRLLALVVGAALVSSACGGCVEVDSETEAVYGMTFKILCISCKRRSETNAETFTEWTFRQKGTEEFVKILRYENEVLQLEEDERFEGRVVWNGSRGTKDLQDLSIFITNVTYNHSGDYECHVYRLLFFENYEHNTSVVKKIHIEVVDKANRDMASIVSEIMMYVLIVVLTIWLVAEMIYCYKKIAAATETAAQENASEYLAITSESKENCTGVQVAEGSGATNFSLLKQAGDVEENPGPMHRDAWLPRPAFSLTGLSLFFSLVPPGRSMEVTVPATLNVLNGSDARLPCTFNSCYTVNHKQFSLNWTYQECNNCSEEMFLQFRMKIINLKLERFQDRVEFSGNPSKYDVSVMLRNVQPEDEGIYNCYIMNPPDRHRGHGKIHLQVLMEEPPERDSTVAVIVGASVGGFLAVVILVLMVVKCVRRKKEQKLSTDDLKTEEEGKTDGEGNPDDGAKGSGATNFSLLKQAGDVEENPGPMPAFNRLFPLASLVLIYWVSVCFPVCVEVPSETEAVQGNPMKLRCISCMKREEVEATTVVEWFYRPEGGKDFLIYEYRNGHQEVESPFQGRLQWNGSKDLQDVSITVLNVTLNDSGLYTCNVSREFEFEAHRPFVKTTRLIPLRVTEEAGEDFTSVVSEIMMYILLVFLTLWLLIEMIYCYRKVSKAEEAAQENASDYLAIPSENKENSAVPVEE

SEQ ID NO: 37 - protein, 2246 aa, Artificial Sequence
  hNav1.2+P2A+hNavBeta1
MAQSVLVPPGPDSFRFFTRESLAAIEQRIAEEKAKRPKQERKDEDDENGPKPNSDLEAGKSLPFIYGDIPPEMVSVPLEDLDPYYINKKTFIVLNKGKAISRFSATPALYILTPFNPIRKLAIKILVHSLFNMLIMCTILTNCVFMTMSNPPDWTKNVEYTFTGIYTFESLIKILARGFCLEDFTFLRDPWNWLDFTVITFAYVTEFVDLGNVSALRTFRVLRALKTISVIPGLKTIVGALIQSVKKLSDVMILTVFCLSVFALIGLQLFMGNLRNKCLQWPPDNSSFEINITSFFNNSLDGNGTTFNRTVSIFNWDEYIEDKSHFYFLEGQNDALLCGNSSDAGQCPEGYICVKAGRNPNYGYTSFDTFSWAFLSLFRLMTQDFWENLYQLTLRAAGKTYMIFFVLVIFLGSFYLINLILAVVAMAYEEQNQATLEEAEQKEAEFQQMLEQLKKQQEEAQAAAAAASAESRDFSGAGGIGVFSESSSVASKLSSKSEKELKNRRKKKKQKEQSGEEEKNDRVRKSESEDSIRRKGFRFSLEGSRLTYEKRFSSPHQSLLSIRGSLFSPRRNSRASLFSFRGRAKDIGSENDFADDEHSTFEDNDSRRDSLFVPHRHGERRHSNVSQASRASRVLPILPMNGKMHSAVDCNGVVSLVGGPSTLTSAGQLLPEGTTTETEIRKRRSSSYHVSMDLLEDPTSRQRAMSIASILTNTMEELEESRQKCPPCWYKFANMCLIWDCCKPWLKVKHLVNLVVMDPFVDLAITICIVLNTLFMAMEHYPMTEQFSSVLSVGNLVFTGIFTAEMFLKIIAMDPYYYFQEGWNIFDGFIVSLSLMELGLANVEGLSVLRSFRLLRVFKLAKSWPTLNMLIKIIGNSVGALGNLTLVLAIIVFIFAVVGMQLFGKSYKECVCKISNDCELPRWHMHDFFHSFLIVFRVLCGEWIETMWDCMEVAGQTMCLTVFMMVMVIGNLVVLNLFLALLLSSFSSDNLAATDDDNEMNNLQIAVGRMQKGIDFVKRKIREFIQKAFVRKQKALDEIKPLEDLNNKKDSCISNHTTIEIGKDLNYLKDGNGTTSGIGSSVEKYVVDESDYMSFINNPSLTVTVPIAVGESDFENLNTEEFSSESDMEESKEKLNATSSSEGSTVDIGAPAEGEQPEVEPEESLEPEACFTEDCVRKFKCCQISIEEGKGKLWWNLRKTCYKIVEHNWFETFIVFMILLSSGALAFEDIYIEQRKTIKTMLEYADKVFTYIFILEMLLKWVAYGFQVYFTNAWCWLDFLIVDVSLVSLTANALGYSELGAIKSLRTLRALRPLRALSRFEGMRVVVNALLGAIPSIMNVLLVCLIFWLIFSIMGVNLFAGKFYHCINYTTGEMFDVSVVNNYSECKALIESNQTARWKNVKVNFDNVGLGYLSLLQVATFKGWMDIMYAAVDSRNVELQPKYEDNLYMYLYFVIFIIFGSFFTLNLFIGVIIDNFNQQKKKFGGQDIFMTEEQKKYYNAMKKLGSKKPQKPIPRPANKFQGMVFDFVTKQVFDISIMILICLNMVTMMVETDDQSQEMTNILYWINLVFIVLFTGECVLKLISLRYYYFTIGWNIFDFVVVILSIVGMFLAELIEKYFVSPTLFRVIRLARIGRILRLIKGAKGIRTLLFALMMSLPALFNIGLLLFLVMFIYAIFGMSNFAYVKREVGIDDMFNFETFGNSMICLFQITTSAGWDGLLAPILNSGPPDCDPDKDHPGSSVKGDCGNPSVGIFFFVSYIIISFLVVVNMYIAVILENFSVATEESAEPLSEDDFEMFYEVWEKFDPDATQFIEFAKLSDFADALDPPLLIAKPNKVQLIAMDLPMVSGDRIHCLDILFAFTKRVLGESGEMDALRIQMEERFMASNPSKVSYEPITTTLKRKQEEVSAIIIQRAYRRYLLKQKVKKVSSIYKKDKGKECDGTPIKEDTLIDKLNENSTPEKTDMTPSTTSPPSYDSVTKPEKEKFEKDKSEKEDKGKDIRESKKGSGATNFSLLKQAGDVEENPGPMMGRLLALVVGAALVSSACGGCVEVDSETEAVYGMTFKILCISCKRRSETNAETFTEWTFRQKGTEEFVKILRYENEVLQLEEDERFEGRVVWNGSRGTKDLQDLSIFITNVTYNHSGDYECHVYRLLFFENYEHNTSVVKKIHIEVVDKANRDMASIVSEIMMYVLIVVLTIWLVAEMIYCYKKIAAATETAAQENASEYLAITSESKENCTGVQVAE

SEQ ID NO: 38 - protein, 2482 aa, Artificial Sequence
  hNav1.2+P2A+hNavBeta1+P2A+hNavBeta2
MAQSVLVPPGPDSFRFFTRESLAAIEQRIAEEKAKRPKQERKDEDDENGPKPNSDLEAGKSLPFIYGDIPPEMVSVPLEDLDPYYINKKTFIVLNKGKAISRFSATPALYILTPFNPIRKLAIKILVHSLFNMLIMCTILTNCVFMTMSNPPDWTKNVEYTFTGIYTFESLIKILARGFCLEDFTFLRDPWNWLDFTVITFAYVTEFVDLGNVSALRTFRVLRALKTISVIPGLKTIVGALIQSVKKLSDVMILTVFCLSVFALIGLQLFMGNLRNKCLQWPPDNSSFEINITSFFNNSLDGNGTTFNRTVSIFNWDEYIEDKSHFYFLEGQNDALLCGNSSDAGQCPEGYICVKAGRNPNYGYTSFDTFSWAFLSLFRLMTQDFWENLYQLTLRAAGKTYMIFFVLVIFLGSFYLINLILAVVAMAYEEQNQATLEEAEQKEAEFQQMLEQLKKQQEEAQAAAAAASAESRDFSGAGGIGVFSESSSVASKLSSKSEKELKNRRKKKKQKEQSGEEEKNDRVRKSESEDSIRRKGFRFSLEGSRLTYEKRFSSPHQSLLSIRGSLFSPRRNSRASLFSFRGRAKDIGSENDFADDEHSTFEDNDSRRDSLFVPHRHGERRHSNVSQASRASRVLPILPMNGKMHSAVDCNGVVSLVGGPSTLTSAGQLLPEGTTTETEIRKRRSSSYHVSMDLLEDPTSRQRAMSIASILTNTMEELEESRQKCPPCWYKFANMCLIWDCCKPWLKVKHLVNLVVMDPFVDLAITICIVLNTLFMAMEHYPMTEQFSSVLSVGNLVFTGIFTAEMFLKIIAMDPYYYFQEGWNIFDGFIVSLSLMELGLANVEGLSVLRSFRLLRVFKLAKSWPTLNMLIKIIGNSVGALGNLTLVLAIIVFIFAVVGMQLFGKSYKECVCKISNDCELPRWHMHDFFHSFLIVFRVLCGEWIETMWDCMEVAGQTMCLTVFMMVMVIGNLVVLNLFLALLLSSFSSDNLAATDDDNEMNNLQIAVGRMQKGIDFVKRKIREFIQKAFVRKQKALDEIKPLEDLNNKKDSCISNHTTIEIGKDLNYLKDGNGTTSGIGSSVEKYVVDESDYMSFINNPSLTVTVPIAVGESDFENLNTEEFSSESDMEESKEKLNATSSSEGSTVDIGAPAEGEQPEVEPEESLEPEACFTEDCVRKFKCCQISIEEGKGKLWWNLRKTCYKIVEHNWFETFIVFMILLSSGALAFEDIYIEQRKTIKTMLEYADKVFTYIFILEMLLKWVAYGFQVYFTNAWCWLDFLIVDVSLVSLTANALGYSELGAIKSLRTLRALRPLRALSRFEGMRVVVNALLGAIPSIMNVLLVCLIFWLIFSIMGVNLFAGKFYHCINYTTGEMFDVSVVNNYSECKALIESNQTARWKNVKVNFDNVGLGYLSLLQVATFKGWMDIMYAAVDSRNVELQPKYEDNLYMYLYFVIFIIFGSFFTLNLFIGVIIDNFNQQKKKFGGQDIFMTEEQKKYYNAMKKLGSKKPQKPIPRPANKFQGMVFDFVTKQVFDISIMILICLNMVTMMVETDDQSQEMTNILYWINLVFIVLFTGECVLKLISLRYYYFTIGWNIFDFVVVILSIVGMFLAELIEKYFVSPTLFRVIRLARIGRILRLIKGAKGIRTLLFALMMSLPALFNIGLLLFLVMFIYAIFGMSNFAYVKREVGIDDMFNFETFGNSMICLFQITTSAGWDGLLAPILNSGPPDCDPDKDHPGSSVKGDCGNPSVGIFFFVSYIIISFLVVVNMYIAVILENFSVATEESAEPLSEDDFEMFYEVWEKFDPDATQFIEFAKLSDFADALDPPLLIAKPNKVQLIAMDLPMVSGDRIHCLDILFAFTKRVLGESGEMDALRIQMEERFMASNPSKVSYEPITTTLKRKQEEVSAIIIQRAYRRYLLKQKVKKVSSIYKKDKGKECDGTPIKEDTLIDKLNENSTPEKTDMTPSTTSPPSYDSVTKPEKEKFEKDKSEKEDKGKDIRESKKGSGATNFSLLKQAGDVEENPGPMGRLLALVVGAALVSSACGGCVEVDSETEAVYGMTFKILCISCKRRSETNAETFTEWTFRQKGTEEFVKILRYENEVLQLEEDERFEGRVVWNGSRGTKDLQDLSIFITNVTYNHSGDYECHVYRLLFFENYEHNTSVVKKIHIEVVDKANRDMASIVSEIMMYVLIVVLTIWLVAEMIYCYKKIAAATETAAQENASEYLAITSESKENCTGVQVAEGSGATNFSLLKQAGDVEENPGPMHRDAWLPRPAFSLTGLSLFFSLVPPGRSMEVTVPATLNVLNGSDARLPCTFNSCYTVNHKQFSLNWTYQECNNCSEEMFLQFRMKIINLKLERFQDRVEFSGNPSKYDVSVMLRNVQPEDEGIYNCYIMNPPDRHRGHGKIHLQVLMEEPPERDSTVAVIVGASVGGFLAVVILVLMVVKCVRRKKEQKLSTDDLKTEEEGKTDGEGNPDDGAK

SEQ ID NO: 39 - protein, 2720 aa, Artificial Sequence
  hNav1.2+P2A+hNavBeta1+P2A+hNavBeta2+P2A+hNavBeta3
MAQSVLVPPGPDSFRFFTRESLAAIEQRIAEEKAKRPKQERKDEDDENGPKPNSDLEAGKSLPFIYGDIPPEMVSVPLEDLDPYYINKKTFIVLNKGKAISRFSATPALYILTPFNPIRKLAIKILVHSLFNMLIMCTILTNCVFMTMSNPPDWTKNVEYTFTGIYTFESLIKILARGFCLEDFTFLRDPWNWLDFTVITFAYVTEFVDLGNVSALRTFRVLRALKTISVIPGLKTIVGALIQSVKKLSDVMILTVFCLSVFALIGLQLFMGNLRNKCLQWPPDNSSFEINITSFFNNSLDGNGTTFNRTVSIFNWDEYIEDKSHFYFLEGQNDALLCGNSSDAGQCPEGYICVKAGRNPNYGYTSFDTFSWAFLSLFRLMTQDFWENLYQLTLRAAGKTYMIFFVLVIFLGSFYLINLILAVVAMAYEEQNQATLEEAEQKEAEFQQMLEQLKKQQEEAQAAAAAASAESRDFSGAGGIGVFSESSSVASKLSSKSEKELKNRRKKKKQKEQSGEEEKNDRVRKSESEDSIRRKGFRFSLEGSRLTYEKRFSSPHQSLLSIRGSLFSPRRNSRASLFSFRGRAKDIGSENDFADDEHSTFEDNDSRRDSLFVPHRHGERRHSNVSQASRASRVLPILPMNGKMHSAVDCNGVVSLVGGPSTLTSAGQLLPEGTTTETEIRKRRSSSYHVSMDLLEDPTSRQRAMSIASILTNTMEELEESRQKCPPCWYKFANMCLIWDCCKPWLKVKHLVNLVVMDPFVDLAITICIVLNTLFMAMEHYPMTEQFSSVLSVGNLVFTGIFTAEMFLKIIAMDPYYYFQEGWNIFDGFIVSLSLMELGLANVEGLSVLRSFRLLRVFKLAKSWPTLNMLIKIIGNSVGALGNLTLVLAIIVFIFAVVGMQLFGKSYKECVCKISNDCELPRWHMHDFFHSFLIVFRVLCGEWIETMWDCMEVAGQTMCLTVFMMVMVIGNLVVLNLFLALLLSSFSSDNLAATDDDNEMNNLQIAVGRMQKGIDFVKRKIREFIQKAFVRKQKALDEIKPLEDLNNKKDSCISNHTTIEIGKDLNYLKDGNGTTSGIGSSVEKYVVDESDYMSFINNPSLTVTVPIAVGESDFENLNTEEFSSESDMEESKEKLNATSSSEGSTVDIGAPAEGEQPEVEPEESLEPEACFTEDCVRKFKCCQISIEEGKGKLWWNLRKTCYKIVEHNWFETFIVFMILLSSGALAFEDIYIEQRKTIKTMLEYADKVFTYIFILEMLLKWVAYGFQVYFTNAWCWLDFLIVDVSLVSLTANALGYSELGAIKSLRTLRALRPLRALSRFEGMRVVVNALLGAIPSIMNVLLVCLIFWLIFSIMGVNLFAGKFYHCINYTTGEMFDVSVVNNYSECKALIESNQTARWKNVKVNFDNVGLGYLSLLQVATFKGWMDIMYAAVDSRNVELQPKYEDNLYMYLYFVIFIIFGSFFTLNLFIGVIIDNFNQQKKKFGGQDIFMTEEQKKYYNAMKKLGSKKPQKPIPRPANKFQGMVFDFVTKQVFDISIMILICLNMVTMMVETDDQSQEMTNILYWINLVFIVLFTGECVLKLISLRYYYFTIGWNIFDFVVVILSIVGMFLAELIEKYFVSPTLFRVIRLARIGRILRLIKGAKGIRTLLFALMMSLPALFNIGLLLFLVMFIYAIFGMSNFAYVKREVGIDDMFNFETFGNSMICLFQITTSAGWDGLLAPILNSGPPDCDPDKDHPGSSVKGDCGNPSVGIFFFVSYIIISFLVVVNMYIAVILENFSVATEESAEPLSEDDFEMFYEVWEKFDPDATQFIEFAKLSDFADALDPPLLIAKPNKVQLIAMDLPMVSGDRIHCLDILFAFTKRVLGESGEMDALRIQMEERFMASNPSKVSYEPITTTLKRKQEEVSAIIIQRAYRRYLLKQKVKKVSSIYKKDKGKECDGTPIKEDTLIDKLNENSTPEKTDMTPSTTSPPSYDSVTKPEKEKFEKDKSEKEDKGKDIRESKKGSGATNFSLLKQAGDVEENPGPMMGRLLALVVGAALVSSACGGCVEVDSETEAVYGMTFKILCISCKRRSETNAETFTEWTFRQKGTEEFVKILRYENEVLQLEEDERFEGRVVWNGSRGTKDLQDLSIFITNVTYNHSGDYECHVYRLLFFENYEHNTSVVKKIHIEVVDKANRDMASIVSEIMMYVLIVVLTIWLVAEMIYCYKKIAAATETAAQENASEYLAITSESKENCTGVQVAEGSGATNFSLLKQAGDVEENPGPMHRDAWLPRPAFSLTGLSLFFSLVPPGRSMEVTVPATLNVLNGSDARLPCTFNSCYTVNHKQFSLNWTYQECNNCSEEMFLQFRMKIINLKLERFQDRVEFSGNPSKYDVSVMLRNVQPEDEGIYNCYIMNPPDRHRGHGKIHLQVLMEEPPERDSTVAVIVGASVGGFLAVVILVLMVVKCVRRKKEQKLSTDDLKTEEEGKTDGEGNPDDGAKGSGATNFSLLKQAGDVEENPGPMPAFNRLFPLASLVLIYWVSVCFPVCVEVPSETEAVQGNPMKLRCISCMKREEVEATTVVEWFYRPEGGKDFLIYEYRNGHQEVESPFQGRLQWNGSKDLQDVSITVLNVTLNDSGLYTCNVSREFEFEAHRPFVKTTRLIPLRVTEEAGEDFTSVVSEIMMYILLVFLTLWLLIEMIYCYRKVSKAEEAAQENASDYLAIPSENKENSAVPVEE

SEQ ID NO: 40 - protein, 2241 aa, Artificial Sequence
  hNav1.3+P2A+hNavBeta1
MAQALLVPPGPESFRLFTRESLAAIEKRAAEEKAKKPKKEQDNDDENKPKPNSDLEAGKNLPFIYGDIPPEMVSEPLEDLDPYYINKKTFIVMNKGKAIFRFSATSALYILTPLNPVRKIAIKILVHSLFSMLIMCTILTNCVFMTLSNPPDWTKNVEYTFTGIYTFESLIKILARGFCLEDFTFLRDPWNWLDFSVIVMAYVTEFVSLGNVSALRTFRVLRALKTISVIPGLKTIVGALIQSVKKLSDVMILTVFCLSVFALIGLQLFMGNLRNKCLQWPPSDSAFETNTTSYFNGTMDSNGTFVNVTMSTFNWKDYIGDDSHFYVLDGQKDPLLCGNGSDAGQCPEGYICVKAGRNPNYGYTSFDTFSWAFLSLFRLMTQDYWENLYQLTLRAAGKTYMIFFVLVIFLGSFYLVNLILAVVAMAYEEQNQATLEEAEQKEAEFQQMLEQLKKQQEEAQAVAAASAASRDFSGIGGLGELLESSSEASKLSSKSAKEWRNRRKKRRQREHLEGNNKGERDSFPKSESEDSVKRSSFLFSMDGNRLTSDKKFCSPHQSLLSIRGSLFSPRRNSKTSIFSFRGRAKDVGSENDFADDEHSTFEDSESRRDSLFVPHRHGERRNSNVSQASMSSRMVPGLPANGKMHSTVDCNGVVSLVGGPSALTSPTGQLPPEGTTTETEVRKRRLSSYQISMEMLEDSSGRQRAVSIASILTNTMEELEESRQKCPPCWYRFANVFLIWDCCDAWLKVKHLVNLIVMDPFVDLAITICIVLNTLFMAMEHYPMTEQFSSVLTVGNLVFTGIFTAEMVLKIIAMDPYYYFQEGWNIFDGIIVSLSLMELGLSNVEGLSVLRSFRLLRVFKLAKSWPTLNMLIKIIGNSVGALGNLTLVLAIIVFIFAVVGMQLFGKSYKECVCKINDDCTLPRWHMNDFFHSFLIVFRVLCGEWIETMWDCMEVAGQTMCLIVFMLVMVIGNLVVLNLFLALLLSSFSSDNLAATDDDNEMNNLQIAVGRMQKGIDYVKNKMRECFQKAFFRKPKVIEIHEGNKIDSCMSNNTGIEISKELNYLRDGNGTTSGVGTGSSVEKYVIDENDYMSFINNPSLTVTVPIAVGESDFENLNTEEFSSESELEESKEKLNATSSSEGSTVDVVLPREGEQAETEPEEDLKPEACFTEGCIKKFPFCQVSTEEGKGKIWWNLRKTCYSIVEHNWFETFIVFMILLSSGALAFEDIYIEQRKTIKTMLEYADKVFTYIFILEMLLKWVAYGFQTYFTNAWCWLDFLIVDVSLVSLVANALGYSELGAIKSLRTLRALRPLRALSRFEGMRVVVNALVGAIPSIMNVLLVCLIFWLIFSIMGVNLFAGKFYHCVNMTTGNMFDISDVNNLSDCQALGKQARWKNVKVNFDNVGAGYLALLQVATFKGWMDIMYAAVDSRDVKLQPVYEENLYMYLYFVIFIIFGSFFTLNLFIGVIIDNFNQQKKKFGGQDIFMTEEQKKYYNAMKKLGSKKPQKPIPRPANKFQGMVFDFVTRQVFDISIMILICLNMVTMMVETDDQGKYMTLVLSRINLVFIVLFTGEFVLKLVSLRHYYFTIGWNIFDFVVVILSIVGMFLAEMIEKYFVSPTLFRVIRLARIGRILRLIKGAKGIRTLLFALMMSLPALFNIGLLLFLVMFIYAIFGMSNFAYVKKEAGIDDMFNFETFGNSMICLFQITTSAGWDGLLAPILNSAPPDCDPDTIHPGSSVKGDCGNPSVGIFFFVSYIIISFLVVVNMYIAVILENFSVATEESAEPLSEDDFEMFYEVWEKFDPDATQFIEFSKLSDFAAALDPPLLIAKPNKVQLIAMDLPMVSGDRIHCLDILFAFTKRVLGESGEMDALRIQMEDRFMASNPSKVSYEPITTTLKRKQEEVSAAIIQRNFRCYLLKQRLKNISSNYNKEAIKGRIDLPIKQDMIIDKLNGNSTPEKTDGSSSTTSPPSYDSVTKPDKEKFEKDKPEKESKGKEVRENQKGSGATNFSLLKQAGDVEENPGPMMGRLLALVVGAALVSSACGGCVEVDSETEAVYGMTFKILCISCKRRSETNAETFTEWTFRQKGTEEFVKILRYENEVLQLEEDERFEGRVVWNGSRGTKDLQDLSIFITNVTYNHSGDYECHVYRLLFFENYEHNTSVVKKIHIEVVDKANRDMASIVSEIMMYVLIVVLTIWLVAEMIYCYKKIAAATETAAQENASEYLAITSESKENCTGVQVAE

SEQ ID NO: 41 - protein, 2478 aa, Artificial Sequence
  hNav1.3+P2A+hNavBeta1+P2A+hNavBeta2
MAQALLVPPGPESFRLFTRESLAAIEKRAAEEKAKKPKKEQDNDDENKPKPNSDLEAGKNLPFIYGDIPPEMVSEPLEDLDPYYINKKTFIVMNKGKAIFRFSATSALYILTPLNPVRKIAIKILVHSLFSMLIMCTILTNCVFMTLSNPPDWTKNVEYTFTGIYTFESLIKILARGFCLEDFTFLRDPWNWLDFSVIVMAYVTEFVSLGNVSALRTFRVLRALKTISVIPGLKTIVGALIQSVKKLSDVMILTVFCLSVFALIGLQLFMGNLRNKCLQWPPSDSAFETNTTSYFNGTMDSNGTFVNVTMSTFNWKDYIGDDSHFYVLDGQKDPLLCGNGSDAGQCPEGYICVKAGRNPNYGYTSFDTFSWAFLSLFRLMTQDYWENLYQLTLRAAGKTYMIFFVLVIFLGSFYLVNLILAVVAMAYEEQNQATLEEAEQKEAEFQQMLEQLKKQQEEAQAVAAASAASRDFSGIGGLGELLESSSEASKLSSKSAKEWRNRRKKRRQREHLEGNNKGERDSFPKSESEDSVKRSSFLFSMDGNRLTSDKKFCSPHQSLLSIRGSLFSPRRNSKTSIFSFRGRAKDVGSENDFADDEHSTFEDSESRRDSLFVPHRHGERRNSNVSQASMSSRMVPGLPANGKMHSTVDCNGVVSLVGGPSALTSPTGQLPPEGTTTETEVRKRRLSSYQISMEMLEDSSGRQRAVSIASILTNTMEELEESRQKCPPCWYRFANVFLIWDCCDAWLKVKHLVNLIVMDPFVDLAITICIVLNTLFMAMEHYPMTEQFSSVLTVGNLVFTGIFTAEMVLKIIAMDPYYYFQEGWNIFDGIIVSLSLMELGLSNVEGLSVLRSFRLLRVFKLAKSWPTLNMLIKIIGNSVGALGNLTLVLAIIVFIFAVVGMQLFGKSYKECVCKINDDCTLPRWHMNDFFHSFLIVFRVLCGEWIETMWDCMEVAGQTMCLIVFMLVMVIGNLVVLNLFLALLLSSFSSDNLAATDDDNEMNNLQIAVGRMQKGIDYVKNKMRECFQKAFFRKPKVIEIHEGNKIDSCMSNNTGIEISKELNYLRDGNGTTSGVGTGSSVEKYVIDENDYMSFINNPSLTVTVPIAVGESDFENLNTEEFSSESELEESKEKLNATSSSEGSTVDVVLPREGEQAETEPEEDLKPEACFTEGCIKKFPFCQVSTEEGKGKIWWNLRKTCYSIVEHNWFETFIVFMILLSSGALAFEDIYIEQRKTIKTMLEYADKVFTYIFILEMLLKWVAYGFQTYFTNAWCWLDFLIVDVSLVSLVANALGYSELGAIKSLRTLRALRPLRALSRFEGMRVVVNALVGAIPSIMNVLLVCLIFWLIFSIMGVNLFAGKFYHCVNMTTGNMFDISDVNNLSDCQALGKQARWKNVKVNFDNVGAGYLALLQVATFKGWMDIMYAAVDSRDVKLQPVYEENLYMYLYFVIFIIFGSFFTLNLFIGVIIDNFNQQKKKFGGQDIFMTEEQKKYYNAMKKLGSKKPQKPIPRPANKFQGMVFDFVTRQVFDISIMILICLNMVTMMVETDDQGKYMTLVLSRINLVFIVLFTGEFVLKLVSLRHYYFTIGWNIFDFVVVILSIVGMFLAEMIEKYFVSPTLFRVIRLARIGRILRLIKGAKGIRTLLFALMMSLPALFNIGLLLFLVMFIYAIFGMSNFAYVKKEAGIDDMFNFETFGNSMICLFQITTSAGWDGLLAPILNSAPPDCDPDTIHPGSSVKGDCGNPSVGIFFFVSYIIISFLVVVNMYIAVILENFSVATEESAEPLSEDDFEMFYEVWEKFDPDATQFIEFSKLSDFAAALDPPLLIAKPNKVQLIAMDLPMVSGDRIHCLDILFAFTKRVLGESGEMDALRIQMEDRFMASNPSKVSYEPITTTLKRKQEEVSAAIIQRNFRCYLLKQRLKNISSNYNKEAIKGRIDLPIKQDMIIDKLNGNSTPEKTDGSSSTTSPPSYDSVTKPDKEKFEKDKPEKESKGKEVRENQKGSGATNFSLLKQAGDVEENPGPMMGRLLALVVGAALVSSACGGCVEVDSETEAVYGMTFKILCISCKRRSETNAETFTEWTFRQKGTEEFVKILRYENEVLQLEEDERFEGRVVWNGSRGTKDLQDLSIFITNVTYNHSGDYECHVYRLLFFENYEHNTSVVKKIHIEVVDKANRDMASIVSEIMMYVLIVVLTIWLVAEMIYCYKKIAAATETAAQENASEYLAITSESKENCTGVQVAEGSGATNFSLLKQAGDVEENPGPMHRDAWLPRPAFSLTGLSLFFSLVPPGRSMEVTVPATLNVLNGSDARLPCTFNSCYTVNHKQFSLNWTYQECNNCSEEMFLQFRMKIINLKLERFQDRVEFSGNPSKYDVSVMLRNVQPEDEGIYNCYIMNPPDRHRGHGKIHLQVLMEEPPERDSTVAVIVGASVGGFLAVVILVLMVVKCVRRKKEQKLSTDDLKTEEEGKTDGEGNPDDGAK

SEQ ID NO: 42 - protein, 2715 aa, Artificial Sequence
  hNav1.3+P2A+hNavBeta1+P2A+hNavBeta2+P2A+hNavBeta3
MAQALLVPPGPESFRLFTRESLAAIEKRAAEEKAKKPKKEQDNDDENKPKPNSDLEAGKNLPFIYGDIPPEMVSEPLEDLDPYYINKKTFIVMNKGKAIFRFSATSALYILTPLNPVRKIAIKILVHSLFSMLIMCTILTNCVFMTLSNPPDWTKNVEYTFTGIYTFESLIKILARGFCLEDFTFLRDPWNWLDFSVIVMAYVTEFVSLGNVSALRTFRVLRALKTISVIPGLKTIVGALIQSVKKLSDVMILTVFCLSVFALIGLQLFMGNLRNKCLQWPPSDSAFETNTTSYFNGTMDSNGTFVNVTMSTFNWKDYIGDDSHFYVLDGQKDPLLCGNGSDAGQCPEGYICVKAGRNPNYGYTSFDTFSWAFLSLFRLMTQDYWENLYQLTLRAAGKTYMIFFVLVIFLGSFYLVNLILAVVAMAYEEQNQATLEEAEQKEAEFQQMLEQLKKQQEEAQAVAAASAASRDFSGIGGLGELLESSSEASKLSSKSAKEWRNRRKKRRQREHLEGNNKGERDSFPKSESEDSVKRSSFLFSMDGNRLTSDKKFCSPHQSLLSIRGSLFSPRRNSKTSIFSFRGRAKDVGSENDFADDEHSTFEDSESRRDSLFVPHRHGERRNSNVSQASMSSRMVPGLPANGKMHSTVDCNGVVSLVGGPSALTSPTGQLPPEGTTTETEVRKRRLSSYQISMEMLEDSSGRQRAVSIASILTNTMEELEESRQKCPPCWYRFANVFLIWDCCDAWLKVKHLVNLIVMDPFVDLAITICIVLNTLFMAMEHYPMTEQFSSVLTVGNLVFTGIFTAEMVLKIIAMDPYYYFQEGWNIFDGIIVSLSLMELGLSNVEGLSVLRSFRLLRVFKLAKSWPTLNMLIKIIGNSVGALGNLTLVLAIIVFIFAVVGMQLFGKSYKECVCKINDDCTLPRWHMNDFFHSFLIVFRVLCGEWIETMWDCMEVAGQTMCLIVFMLVMVIGNLVVLNLFLALLLSSFSSDNLAATDDDNEMNNLQIAVGRMQKGIDYVKNKMRECFQKAFFRKPKVIEIHEGNKIDSCMSNNTGIEISKELNYLRDGNGTTSGVGTGSSVEKYVIDENDYMSFINNPSLTVTVPIAVGESDFENLNTEEFSSESELEESKEKLNATSSSEGSTVDVVLPREGEQAETEPEEDLKPEACFTEGCIKKFPFCQVSTEEGKGKIWWNLRKTCYSIVEHNWFETFIVFMILLSSGALAFEDIYIEQRKTIKTMLEYADKVFTYIFILEMLLKWVAYGFQTYFTNAWCWLDFLIVDVSLVSLVANALGYSELGAIKSLRTLRALRPLRALSRFEGMRVVVNALVGAIPSIMNVLLVCLIFWLIFSIMGVNLFAGKFYHCVNMTTGNMFDISDVNNLSDCQALGKQARWKNVKVNFDNVGAGYLALLQVATFKGWMDIMYAAVDSRDVKLQPVYEENLYMYLYFVIFIIFGSFFTLNLFIGVIIDNFNQQKKKFGGQDIFMTEEQKKYYNAMKKLGSKKPQKPIPRPANKFQGMVFDFVTRQVFDISIMILICLNMVTMMVETDDQGKYMTLVLSRINLVFIVLFTGEFVLKLVSLRHYYFTIGWNIFDFVVVILSIVGMFLAEMIEKYFVSPTLFRVIRLARIGRILRLIKGAKGIRTLLFALMMSLPALFNIGLLLFLVMFIYAIFGMSNFAYVKKEAGIDDMFNFETFGNSMICLFQITTSAGWDGLLAPILNSAPPDCDPDTIHPGSSVKGDCGNPSVGIFFFVSYIIISFLVVVNMYIAVILENFSVATEESAEPLSEDDFEMFYEVWEKFDPDATQFIEFSKLSDFAAALDPPLLIAKPNKVQLIAMDLPMVSGDRIHCLDILFAFTKRVLGESGEMDALRIQMEDRFMASNPSKVSYEPITTTLKRKQEEVSAAIIQRNFRCYLLKQRLKNISSNYNKEAIKGRIDLPIKQDMIIDKLNGNSTPEKTDGSSSTTSPPSYDSVTKPDKEKFEKDKPEKESKGKEVRENQKGSGATNFSLLKQAGDVEENPGPMMGRLLALVVGAALVSSACGGCVEVDSETEAVYGMTFKILCISCKRRSETNAETFTEWTFRQKGTEEFVKILRYENEVLQLEEDERFEGRVVWNGSRGTKDLQDLSIFITNVTYNHSGDYECHVYRLLFFENYEHNTSVVKKIHIEVVDKANRDMASIVSEIMMYVLIVVLTIWLVAEMIYCYKKIAAATETAAQENASEYLAITSESKENCTGVQVAEGSGATNFSLLKQAGDVEENPGPMHRDAWLPRPAFSLTGLSLFFSLVPPGRSMEVTVPATLNVLNGSDARLPCTFNSCYTVNHKQFSLNWTYQECNNCSEEMFLQFRMKIINLKLERFQDRVEFSGNPSKYDVSVMLRNVQPEDEGIYNCYIMNPPDRHRGHGKIHLQVLMEEPPERDSTVAVIVGASVGGFLAVVILVLMVVKCVRRKKEQKLSTDDLKTEEEGKTDGEGNPDDGAKGSGATNFSLLKQAGDVEENPGPMPAFNRLFPLASLVLIYWVSVCFPVCVEVPSETEAVQGNPMKLRCISCMKREEVEATTVVEWFYRPEGGKDFLIYEYRNGHQEVESPFQGRLQWNGSKDLQDVSITVLNVTLNDSGLYTCNVSREFEFEAHRPFVKTTRLIPLRVTEEAGEDFTSVVSEIMMYILLVFLTLWLLIEMIYCYRKVSKAEEAAQENASDYLAIPSENKENSAVPVEE

SEQ ID NO: 43 - protein, 2078 aa, Artificial Sequence
  hNav1.4+P2A+hNavBeta1
MARPSLCTLVPLGPECLRPFTRESLAAIEQRAVEEEARLQRNKQMEIEEPERKPRSDLEAGKNLPMIYGDPPPEVIGIPLEDLDPYYSNKKTFIVLNKGKAIFRFSATPALYLLSPFSVVRRGAIKVLIHALFSMFIMITILTNCVFMTMSDPPPWSKNVEYTFTGIYTFESLIKILARGFCVDDFTFLRDPWNWLDFSVIMMAYLTEFVDLGNISALRTFRVLRALKTITVIPGLKTIVGALIQSVKKLSDVMILTVFCLSVFALVGLQLFMGNLRQKCVRWPPPFNDTNTTWYSNDTWYGNDTWYGNEMWYGNDSWYANDTWNSHASWATNDTFDWDAYISDEGNFYFLEGSNDALLCGNSSDAGHCPEGYECIKTGRNPNYGYTSYDTFSWAFLALFRLMTQDYWENLFQLTLRAAGKTYMIFFVVIIFLGSFYLINLILAVVAMAYAEQNEATLAEDKEKEEEFQQMLEKFKKHQEELEKAKAAQALEGGEADGDPAHGKDCNGSLDTSQGEKGAPRQSSSGDSGISDAMEELEEAHQKCPPWWYKCAHKVLIWNCCAPWLKFKNIIHLIVMDPFVDLGITICIVLNTLFMAMEHYPMTEHFDNVLTVGNLVFTGIFTAEMVLKLIAMDPYEYFQQGWNIFDSIIVTLSLVELGLANVQGLSVLRSFRLLRVFKLAKSWPTLNMLIKIIGNSVGALGNLTLVLAIIVFIFAVVGMQLFGKSYKECVCKIALDCNLPRWHMHDFFHSFLIVFRILCGEWIETMWDCMEVAGQAMCLTVFLMVMVIGNLVVLNLFLALLLSSFSADSLAASDEDGEMNNLQIAIGRIKLGIGFAKAFLLGLLHGKILSPKDIMLSLGEADGAGEAGEAGETAPEDEKKEPPEEDLKKDNHILNHMGLADGPPSSLELDHLNFINNPYLTIQVPIASEESDLEMPTEEETDTFSEPEDSKKPPQPLYDGNSSVCSTADYKPPEEDPEEQAEENPEGEQPEECFTEACVQRWPCLYVDISQGRGKKWWTLRRACFKIVEHNWFETFIVFMILLSSGALAFEDIYIEQRRVIRTILEYADKVFTYIFIMEMLLKWVAYGFKVYFTNAWCWLDFLIVDVSIISLVANWLGYSELGPIKSLRTLRALRPLRALSRFEGMRVVVNALLGAIPSIMNVLLVCLIFWLIFSIMGVNLFAGKFYYCINTTTSERFDISEVNNKSECESLMHTGQVRWLNVKVNYDNVGLGYLSLLQVATFKGWMDIMYAAVDSREKEEQPQYEVNLYMYLYFVIFIIFGSFFTLNLFIGVIIDNFNQQKKKLGGKDIFMTEEQKKYYNAMKKLGSKKPQKPIPRPQNKIQGMVYDLVTKQAFDITIMILICLNMVTMMVETDNQSQLKVDILYNINMIFIIIFTGECVLKMLALRQYYFTVGWNIFDFVVVILSIVGLALSDLIQKYFVSPTLFRVIRLARIGRVLRLIRGAKGIRTLLFALMMSLPALFNIGLLLFLVMFIYSIFGMSNFAYVKKESGIDDMFNFETFGNSIICLFEITTSAGWDGLLNPILNSGPPDCDPNLENPGTSVKGDCGNPSIGICFFCSYIIISFLIVVNMYIAIILENFNVATEESSEPLGEDDFEMFYETWEKFDPDATQFIAYSRLSDFVDTLQEPLRIAKPNKIKLITLDLPMVPGDKIHCLDILFALTKEVLGDSGEMDALKQTMEEKFMAANPSKVSYEPITTTLKRKHEEVCAIKIQRAYRRHLLQRSMKQASYMYRHSHDGSGDDAPEKEGLLANTMSKMYGHENGNSSSPSPEEKGEAGDAGPTMGLMPISPSDTAWPPAPPPGQTVRPGVKESLVGSGATNFSLLKQAGDVEENPGPMMMGRLLALVVGAALVSSACGGCVEVDSETEAVYGMTFKILCISCKRRSETNAETFTEWTFRQKGTEEFVKILRYENEVLQLEEDERFEGRVVWNGSRGTKDLQDLSIFITNVTYNHSGDYECHVYRLLFFENYEHNTSVVKKIHIEVVDKANRDMASIVSEIMMYVLIVVLTIWLVAEMIYCYKKIAAATETAAQENASEYLAITSESKENCTGVQVAE

SEQ ID NO: 44 - protein, 2315 aa, Artificial Sequence
  hNav1.4+P2A+hNavBeta1+P2A+hNavBeta2
MARPSLCTLVPLGPECLRPFTRESLAAIEQRAVEEEARLQRNKQMEIEEPERKPRSDLEAGKNLPMIYGDPPPEVIGIPLEDLDPYYSNKKTFIVLNKGKAIFRFSATPALYLLSPFSVVRRGAIKVLIHALFSMFIMITILTNCVFMTMSDPPPWSKNVEYTFTGIYTFESLIKILARGFCVDDFTFLRDPWNWLDFSVIMMAYLTEFVDLGNISALRTFRVLRALKTITVIPGLKTIVGALIQSVKKLSDVMILTVFCLSVFALVGLQLFMGNLRQKCVRWPPPFNDTNTTWYSNDTWYGNDTWYGNEMWYGNDSWYANDTWNSHASWATNDTFDWDAYISDEGNFYFLEGSNDALLCGNSSDAGHCPEGYECIKTGRNPNYGYTSYDTFSWAFLALFRLMTQDYWENLFQLTLRAAGKTYMIFFVVIIFLGSFYLINLILAVVAMAYAEQNEATLAEDKEKEEEFQQMLEKFKKHQEELEKAKAAQALEGGEADGDPAHGKDCNGSLDTSQGEKGAPRQSSSGDSGISDAMEELEEAHQKCPPWWYKCAHKVLIWNCCAPWLKFKNIIHLIVMDPFVDLGITICIVLNTLFMAMEHYPMTEHFDNVLTVGNLVFTGIFTAEMVLKLIAMDPYEYFQQGWNIFDSIIVTLSLVELGLANVQGLSVLRSFRLLRVFKLAKSWPTLNMLIKIIGNSVGALGNLTLVLAIIVFIFAVVGMQLFGKSYKECVCKIALDCNLPRWHMHDFFHSFLIVFRILCGEWIETMWDCMEVAGQAMCLTVFLMVMVIGNLVVLNLFLALLLSSFSADSLAASDEDGEMNNLQIAIGRIKLGIGFAKAFLLGLLHGKILSPKDIMLSLGEADGAGEAGEAGETAPEDEKKEPPEEDLKKDNHILNHMGLADGPPSSLELDHLNFINNPYLTIQVPIASEESDLEMPTEEETDTFSEPEDSKKPPQPLYDGNSSVCSTADYKPPEEDPEEQAEENPEGEQPEECFTEACVQRWPCLYVDISQGRGKKWWTLRRACFKIVEHNWFETFIVFMILLSSGALAFEDIYIEQRRVIRTILEYADKVFTYIFIMEMLLKWVAYGFKVYFTNAWCWLDFLIVDVSIISLVANWLGYSELGPIKSLRTLRALRPLRALSRFEGMRVVVNALLGAIPSIMNVLLVCLIFWLIFSIMGVNLFAGKFYYCINTTTSERFDISEVNNKSECESLMHTGQVRWLNVKVNYDNVGLGYLSLLQVATFKGWMDIMYAAVDSREKEEQPQYEVNLYMYLYFVIFIIFGSFFTLNLFIGVIIDNFNQQKKKLGGKDIFMTEEQKKYYNAMKKLGSKKPQKPIPRPQNKIQGMVYDLVTKQAFDITIMILICLNMVTMMVETDNQSQLKVDILYNINMIFIIIFTGECVLKMLALRQYYFTVGWNIFDFVVVILSIVGLALSDLIQKYFVSPTLFRVIRLARIGRVLRLIRGAKGIRTLLFALMMSLPALFNIGLLLFLVMFIYSIFGMSNFAYVKKESGIDDMFNFETFGNSIICLFEITTSAGWDGLLNPILNSGPPDCDPNLENPGTSVKGDCGNPSIGICFFCSYIIISFLIVVNMYIAIILENFNVATEESSEPLGEDDFEMFYETWEKFDPDATQFIAYSRLSDFVDTLQEPLRIAKPNKIKLITLDLPMVPGDKIHCLDILFALTKEVLGDSGEMDALKQTMEEKFMAANPSKVSYEPITTTLKRKHEEVCAIKIQRAYRRHLLQRSMKQASYMYRHSHDGSGDDAPEKEGLLANTMSKMYGHENGNSSSPSPEEKGEAGDAGPTMGLMPISPSDTAWPPAPPPGQTVRPGVKESLVGSGATNFSLLKQAGDVEENPGPMMMGRLLALVVGAALVSSACGGCVEVDSETEAVYGMTFKILCISCKRRSETNAETFTEWTFRQKGTEEFVKILRYENEVLQLEEDERFEGRVVWNGSRGTKDLQDLSIFITNVTYNHSGDYECHVYRLLFFENYEHNTSVVKKIHIEVVDKANRDMASIVSEIMMYVLIVVLTIWLVAEMIYCYKKIAAATETAAQENASEYLAITSESKENCTGVQVAEGSGATNFSLLKQAGDVEENPGPMHRDAWLPRPAFSLTGLSLFFSLVPPGRSMEVTVPATLNVLNGSDARLPCTFNSCYTVNHKQFSLNWTYQECNNCSEEMFLQFRMKIINLKLERFQDRVEFSGNPSKYDVSVMLRNVQPEDEGIYNCYIMNPPDRHRGHGKIHLQVLMEEPPERDSTVAVIVGASVGGFLAVVILVLMVVKCVRRKKEQKLSTDDLKTEEEGKTDGEGNPDDGAK

SEQ ID NO: 45 - protein, 2550 aa, Artificial Sequence
  hNav1.4+P2A+hNavBeta1+P2A+hNavBeta2+P2A+hNavBeta3
MARPSLCTLVPLGPECLRPFTRESLAAIEQRAVEEEARLQRNKQMEIEEPERKPRSDLEAGKNLPMIYGDPPPEVIGIPLEDLDPYYSNKKTFIVLNKGKAIFRFSATPALYLLSPFSVVRRGAIKVLIHALFSMFIMITILTNCVFMTMSDPPPWSKNVEYTFTGIYTFESLIKILARGFCVDDFTFLRDPWNWLDFSVIMMAYLTEFVDLGNISALRTFRVLRALKTITVIPGLKTIVGALIQSVKKLSDVMILTVFCLSVFALVGLQLFMGNLRQKCVRWPPPFNDTNTTWYSNDTWYGNDTWYGNEMWYGNDSWYANDTWNSHASWATNDTFDWDAYISDEGNFYFLEGSNDALLCGNSSDAGHCPEGYECIKTGRNPNYGYTSYDTFSWAFLALFRLMTQDYWENLFQLTLRAAGKTYMIFFVVIIFLGSFYLINLILAVVAMAYAEQNEATLAEDKEKEEEFQQMLEKFKKHQEELEKAKAAQALEGGEADGDPAHGKDCNGSLDTSQGEKGAPRQSSSGDSGISDAMEELEEAHQKCPPWWYKCAHKVLIWNCCAPWLKFKNIIHLIVMDPFVDLGITICIVLNTLFMAMEHYPMTEHFDNVLTVGNLVFTGIFTAEMVLKLIAMDPYEYFQQGWNIFDSIIVTLSLVELGLANVQGLSVLRSFRLLRVFKLAKSWPTLNMLIKIIGNSVGALGNLTLVLAIIVFIFAVVGMQLFGKSYKECVCKIALDCNLPRWHMHDFFHSFLIVFRILCGEWIETMWDCMEVAGQAMCLTVFLMVMVIGNLVVLNLFLALLLSSFSADSLAASDEDGEMNNLQIAIGRIKLGIGFAKAFLLGLLHGKILSPKDIMLSLGEADGAGEAGEAGETAPEDEKKEPPEEDLKKDNHILNHMGLADGPPSSLELDHLNFINNPYLTIQVPIASEESDLEMPTEEETDTFSEPEDSKKPPQPLYDGNSSVCSTADYKPPEEDPEEQAEENPEGEQPEECFTEACVQRWPCLYVDISQGRGKKWWTLRRACFKIVEHNWFETFIVFMILLSSGALAFEDIYIEQRRVIRTILEYADKVFTYIFIMEMLLKWVAYGFKVYFTNAWCWLDFLIVDVSIISLVANWLGYSELGPIKSLRTLRALRPLRALSRFEGMRVVVNALLGAIPSIMNVLLVCLIFWLIFSIMGVNLFAGKFYYCINTTTSERFDISEVNNKSECESLMHTGQVRWLNVKVNYDNVGLGYLSLLQVATFKGWMDIMYAAVDSREKEEQPQYEVNLYMYLYFVIFIIFGSFFTLNLFIGVIIDNFNQQKKKLGGKDIFMTEEQKKYYNAMKKLGSKKPQKPIPRPQNKIQGMVYDLVTKQAFDITIMILICLNMVTMMVETDNQSQLKVDILYNINMIFIIIFTGECVLKMLALRQYYFTVGWNIFDFVVVILSIVGLALSDLIQKYFVSPTLFRVIRLARIGRVLRLIRGAKGIRTLLFALMMSLPALFNIGLLLFLVMFIYSIFGMSNFAYVKKESGIDDMFNFETFGNSIICLFEITTSAGWDGLLNPILNSGPPDCDPNLENPGTSVKGDCGNPSIGICFFCSYIIISFLIVVNMYIAIILENFNVATEESSEPLGEDDFEMFYETWEKFDPDATQFIAYSRLSDFVDTLQEPLRIAKPNKIKLITLDLPMVPGDKIHCLDILFALTKEVLGDSGEMDALKQTMEEKFMAANPSKVSYEPITTTLKRKHEEVCAIKIQRAYRRHLLQRSMKQASYMYRHSHDGSGDDAPEKEGLLANTMSKMYGHENGNSSSPSPEEKGEAGDAGPTMGLMPISPSDTAWPPAPPPGQTVRPGVKESLVGSGATNFSLLKQAGDVEENPGMMGRLLALVVGAALVSSACGGCVEVDSETEAVYGMTFKILCISCKRRSETNAETFTEWTFRQKGTEEFVKILRYENEVLQLEEDERFEGRVVWNGSRGTKDLQDLSIFITNVTYNHSGDYECHVYRLLFFENYEHNTSVVKKIHIEVVDKANRDMASIVSEIMMYVLIVVLTIWLVAEMIYCYKKIAAATETAAQENASEYLAITSESKENCTGVQVAEGSGATNFSLLKQAGDVEENPGPMHRDAWLPRPAFSLTGLSLFFSLVPPGRSMEVTVPATLNVLNGSDARLPCTFNSCYTVNHKQFSLNWTYQECNNCSEEMFLQFRMKIINLKLERFQDRVEFSGNPSKYDVSVMLRNVQPEDEGIYNCYIMNPPDRHRGHGKIHLQVLMEEPPERDSTVAVIVGASVGGFLAVVILVLMVVKCVRRKKEQKLSTDDLKTEEEGKTDGEGNPDDGAKGSGATNFSLLKQAGDVEENPGPMPAFNRLFPLASLVLIYWVSVCFPVCVEVPSETEAVQGNPMKLRCISCMKREEVEATTVVEWFYRPEGGKDFLIYEYRNGHQEVESPFQGRLQWNGSKDLQDVSITVLNVTLNDSGLYTCNVSREFEFEAHRPFVKTTRLIPLRVTEEAGEDFTSVVSEIMMYILLVFLTLWLLIEMIYCYRKVSKAEEAAQENASDYLAIPSENKENSAVPVEE

SEQ ID NO: 46 - protein, 2225 aa, Artificial Sequence
  hNav1.5+P2A+hNavBeta1
MANFLLPRGTSSFRRFTRESLAAIEKRMAEKQARGSTTLQESREGLPEEEAPRPQLDLQASKKLPDLYGNPPQELIGEPLEDLDPFYSTQKTFIVLNKGKTIFRFSATNALYVLSPFHPIRRAAVKILVHSLFNMLIMCTILTNCVFMAQHDPPPWTKYVEYTFTAIYTFESLVKILARGFCLHAFTFLRDPWNWLDFSVIIMAYVSENIKLGNLSALRTFRVLRALKTISVIPGLKTIVGALIQSVKKLADVMVLTVFCLSVFALIGLQLFMGNLRHKCVRNFTALNGTNGSVEADGLVWESLDLYLSDPENYLLKNGTSDVLLCGNSSDAGTCPEGYRCLKAGENPDHGYTSFDSFAWAFLALFRLMTQDCWERLYQQTLRSAGKIYMIFFMLVIFLGSFYLVNLILAVVAMAYEEQNQATIAETEEKEKRFQEAMEMLKKEHEALTIRGVDTVSRSSLEMSPLAPVNSHERRSKRRKRMSSGTEECGEDRLPKSDSEDGPRAMNHLSLTRGLSRTSMKPRSSRGSIFTFRRRDLGSEADFADDENSTAGESESHRTSLLVPWPLRRTSAQGQPSPGTSAPGHALHGKKNSTVDCNGVVSLLGAGDPEATSPGSHLLRPVMLEHPPDTTTPSEEPGGPQMLTSQAPCVDGFEEPGARQRALSAVSVLTSALEELEESRHKCPPCWNRLAQRYLIWECCPLWMSIKQGVKLVVMDPFTDLTITMCIVLNTLFMALEHYNMTSEFEEMLQVGNLVFTGIFTAEMTFKIIALDPYYYFQQGWNIFDSIIVILSLMELGLSRMSNLSVLRSFRLLRVFKLAKSWPTLNTLIKIIGNSVGALGNLTLVLAIIVFIFAVVGMQLFGKNYSELRDSDSGLLPRWHMMDFFHAFLIIFRILCGEWIETMWDCMEVSGQSLCLLVFLLVMVIGNLVVLNLFLALLLSSFSADNLTAPDEDREMNNLQLALARIQRGLRFVKRTTWDFCCGLLRQRPQKPAALAAQGQLPSCIATPYSPPPPETEKVPPTRKETRFEEGEQPGQGTPGDPEPVCVPIAVAESDTDDQEEDEENSLGTEEESSKQESQPVSGGPEAPPDSRTWSQVSATASSEAEASASQADWRQQWKAEPQAPGCGETPEDSCSEGSTADMTNTAELLEQIPDLGQDVKDPEDCFTEGCVRRCPCCAVDTTQAPGKVWWRLRKTCYHIVEHSWFETFIIFMILLSSGALAFEDIYLEERKTIKVLLEYADKMFTYVFVLEMLLKWVAYGFKKYFTNAWCWLDFLIVDVSLVSLVANTLGFAEMGPIKSLRTLRALRPLRALSRFEGMRVVVNALVGAIPSIMNVLLVCLIFWLIFSIMGVNLFAGKFGRCINQTEGDLPLNYTIVNNKSQCESLNLTGELYWTKVKVNFDNVGAGYLALLQVATFKGWMDIMYAAVDSRGYEEQPQWEYNLYMYIYFVIFIIFGSFFTLNLFIGVIIDNFNQQKKKLGGQDIFMTEEQKKYYNAMKKLGSKKPQKPIPRPLNKYQGFIFDIVTKQAFDVTIMFLICLNMVTMMVETDDQSPEKINILAKINLLFVAIFTGTVLSDIIQKYFFSPTLFRVIRLARIGRILRLIRGAKGIRTLLFALMMSLPALFNIGLLLFLVMFIYSIFGMANFAYVKWEAGIDDMFNFQTFANSMLCLFQITTSAGWDGLLSPILNTGPPYCDPTLPNSNGSRGDCGSPAVGILFFTTYIIISFLIVVNMYIAIILENFSVATEESTEPLSEDDFDMFYEIWEKFDPEATQFIEYSVLSDFADALSEPLRIAKPNQISLINMDLPMVSGDRIHCMDILFAFTKRVLGESGEMDALKIQMEEKFMAANPSKISYEPITTTLRRKHEEVSAMVIQRAFRRHLLQRSLKHASFLFRQQAGSGLSEEDAPEREGLIAYVMSENFSRPLGPPSSSSISSTSFPPSYDSVTRATSDNLQVRGSDYSHSEDLADFPPSPDRDRESIVGSGATNFSLLKQAGDVEENPGPMMMGRLLALVVGAALVSSACGGCVEVDSETEAVYGMTFKILCISCKRRSETNAETFTEWTFRQKGTEEFVKILRYENEVLQLEEDERFEGRVVWNGSRGTKDLQDLSIFITNVTYNHSGDYECHVYRLLFFENYEHNTSVVKKIHIEVVDKANRDMASIVSEIMMYVLIVVLTIWLVAEMIYCYKKIAAATETAAQENASEYLAITSESKENCTGVQVAE

SEQ ID NO: 47 - protein, 2462 aa, Artificial Sequence
  hNav1.5+P2A+hNavBeta1+P2A+hNavBeta2
MANFLLPRGTSSFRRFTRESLAAIEKRMAEKQARGSTTLQESREGLPEEEAPRPQLDLQASKKLPDLYGNPPQELIGEPLEDLDPFYSTQKTFIVLNKGKTIFRFSATNALYVLSPFHPIRRAAVKILVHSLFNMLIMCTILTNCVFMAQHDPPPWTKYVEYTFTAIYTFESLVKILARGFCLHAFTFLRDPWNWLDFSVIIMAYVSENIKLGNLSALRTFRVLRALKTISVIPGLKTIVGALIQSVKKLADVMVLTVFCLSVFALIGLQLFMGNLRHKCVRNFTALNGTNGSVEADGLVWESLDLYLSDPENYLLKNGTSDVLLCGNSSDAGTCPEGYRCLKAGENPDHGYTSFDSFAWAFLALFRLMTQDCWERLYQQTLRSAGKIYMIFFMLVIFLGSFYLVNLILAVVAMAYEEQNQATIAETEEKEKRFQEAMEMLKKEHEALTIRGVDTVSRSSLEMSPLAPVNSHERRSKRRKRMSSGTEECGEDRLPKSDSEDGPRAMNHLSLTRGLSRTSMKPRSSRGSIFTFRRRDLGSEADFADDENSTAGESESHRTSLLVPWPLRRTSAQGQPSPGTSAPGHALHGKKNSTVDCNGVVSLLGAGDPEATSPGSHLLRPVMLEHPPDTTTPSEEPGGPQMLTSQAPCVDGFEEPGARQRALSAVSVLTSALEELEESRHKCPPCWNRLAQRYLIWECCPLWMSIKQGVKLVVMDPFTDLTITMCIVLNTLFMALEHYNMTSEFEEMLQVGNLVFTGIFTAEMTFKIIALDPYYYFQQGWNIFDSIIVILSLMELGLSRMSNLSVLRSFRLLRVFKLAKSWPTLNTLIKIIGNSVGALGNLTLVLAIIVFIFAVVGMQLFGKNYSELRDSDSGLLPRWHMMDFFHAFLIIFRILCGEWIETMWDCMEVSGQSLCLLVFLLVMVIGNLVVLNLFLALLLSSFSADNLTAPDEDREMNNLQLALARIQRGLRFVKRTTWDFCCGLLRQRPQKPAALAAQGQLPSCIATPYSPPPPETEKVPPTRKETRFEEGEQPGQGTPGDPEPVCVPIAVAESDTDDQEEDEENSLGTEEESSKQESQPVSGGPEAPPDSRTWSQVSATASSEAEASASQADWRQQWKAEPQAPGCGETPEDSCSEGSTADMTNTAELLEQIPDLGQDVKDPEDCFTEGCVRRCPCCAVDTTQAPGKVWWRLRKTCYHIVEHSWFETFIIFMILLSSGALAFEDIYLEERKTIKVLLEYADKMFTYVFVLEMLLKWVAYGFKKYFTNAWCWLDFLIVDVSLVSLVANTLGFAEMGPIKSLRTLRALRPLRALSRFEGMRVVVNALVGAIPSIMNVLLVCLIFWLIFSIMGVNLFAGKFGRCINQTEGDLPLNYTIVNNKSQCESLNLTGELYWTKVKVNFDNVGAGYLALLQVATFKGWMDIMYAAVDSRGYEEQPQWEYNLYMYIYFVIFIIFGSFFTLNLFIGVIIDNFNQQKKKLGGQDIFMTEEQKKYYNAMKKLGSKKPQKPIPRPLNKYQGFIFDIVTKQAFDVTIMFLICLNMVTMMVETDDQSPEKINILAKINLLFVAIFTGTVLSDIIQKYFFSPTLFRVIRLARIGRILRLIRGAKGIRTLLFALMMSLPALFNIGLLLFLVMFIYSIFGMANFAYVKWEAGIDDMFNFQTFANSMLCLFQITTSAGWDGLLSPILNTGPPYCDPTLPNSNGSRGDCGSPAVGILFFTTYIIISFLIVVNMYIAIILENFSVATEESTEPLSEDDFDMFYEIWEKFDPEATQFIEYSVLSDFADALSEPLRIAKPNQISLINMDLPMVSGDRIHCMDILFAFTKRVLGESGEMDALKIQMEEKFMAANPSKISYEPITTTLRRKHEEVSAMVIQRAFRRHLLQRSLKHASFLFRQQAGSGLSEEDAPEREGLIAYVMSENFSRPLGPPSSSSISSTSFPPSYDSVTRATSDNLQVRGSDYSHSEDLADFPPSPDRDRESIVGSGATNFSLLKQAGDVEENPGPMMMGRLLALVVGAALVSSACGGCVEVDSETEAVYGMTFKILCISCKRRSETNAETFTEWTFRQKGTEEFVKILRYENEVLQLEEDERFEGRVVWNGSRGTKDLQDLSIFITNVTYNHSGDYECHVYRLLFFENYEHNTSVVKKIHIEVVDKANRDMASIVSEIMMYVLIVVLTIWLVAEMIYCYKKIAAATETAAQENASEYLAITSESKENCTGVQVAEGSGATNFSLLKQAGDVEENPGPMHRDAWLPRPAFSLTGLSLFFSLVPPGRSMEVTVPATLNVLNGSDARLPCTFNSCYTVNHKQFSLNWTYQECNNCSEEMFLQFRMKIINLKLERFQDRVEFSGNPSKYDVSVMLRNVQPEDEGIYNCYIMNPPDRHRGHGKIHLQVLMEEPPERDSTVAVIVGASVGGFLAVVILVLMVVKCVRRKKEQKLSTDDLKTEEEGKTDGEGNPDDGAK

SEQ ID NO: 48 - protein, 2697 aa, Artificial Sequence
  hNav1.5+P2A+hNavBeta1+P2A+hNavBeta2+P2A+hNavBeta3
MANFLLPRGTSSFRRFTRESLAAIEKRMAEKQARGSTTLQESREGLPEEEAPRPQLDLQASKKLPDLYGNPPQELIGEPLEDLDPFYSTQKTFIVLNKGKTIFRFSATNALYVLSPFHPIRRAAVKILVHSLFNMLIMCTILTNCVFMAQHDPPPWTKYVEYTFTAIYTFESLVKILARGFCLHAFTFLRDPWNWLDFSVIIMAYVSENIKLGNLSALRTFRVLRALKTISVIPGLKTIVGALIQSVKKLADVMVLTVFCLSVFALIGLQLFMGNLRHKCVRNFTALNGTNGSVEADGLVWESLDLYLSDPENYLLKNGTSDVLLCGNSSDAGTCPEGYRCLKAGENPDHGYTSFDSFAWAFLALFRLMTQDCWERLYQQTLRSAGKIYMIFFMLVIFLGSFYLVNLILAVVAMAYEEQNQATIAETEEKEKRFQEAMEMLKKEHEALTIRGVDTVSRSSLEMSPLAPVNSHERRSKRRKRMSSGTEECGEDRLPKSDSEDGPRAMNHLSLTRGLSRTSMKPRSSRGSIFTFRRRDLGSEADFADDENSTAGESESHRTSLLVPWPLRRTSAQGQPSPGTSAPGHALHGKKNSTVDCNGVVSLLGAGDPEATSPGSHLLRPVMLEHPPDTTTPSEEPGGPQMLTSQAPCVDGFEEPGARQRALSAVSVLTSALEELEESRHKCPPCWNRLAQRYLIWECCPLWMSIKQGVKLVVMDPFTDLTITMCIVLNTLFMALEHYNMTSEFEEMLQVGNLVFTGIFTAEMTFKIIALDPYYYFQQGWNIFDSIIVILSLMELGLSRMSNLSVLRSFRLLRVFKLAKSWPTLNTLIKIIGNSVGALGNLTLVLAIIVFIFAVVGMQLFGKNYSELRDSDSGLLPRWHMMDFFHAFLIIFRILCGEWIETMWDCMEVSGQSLCLLVFLLVMVIGNLVVLNLFLALLLSSFSADNLTAPDEDREMNNLQLALARIQRGLRFVKRTTWDFCCGLLRQRPQKPAALAAQGQLPSCIATPYSPPPPETEKVPPTRKETRFEEGEQPGQGTPGDPEPVCVPIAVAESDTDDQEEDEENSLGTEEESSKQESQPVSGGPEAPPDSRTWSQVSATASSEAEASASQADWRQQWKAEPQAPGCGETPEDSCSEGSTADMTNTAELLEQIPDLGQDVKDPEDCFTEGCVRRCPCCAVDTTQAPGKVWWRLRKTCYHIVEHSWFETFIIFMILLSSGALAFEDIYLEERKTIKVLLEYADKMFTYVFVLEMLLKWVAYGFKKYFTNAWCWLDFLIVDVSLVSLVANTLGFAEMGPIKSLRTLRALRPLRALSRFEGMRVVVNALVGAIPSIMNVLLVCLIFWLIFSIMGVNLFAGKFGRCINQTEGDLPLNYTIVNNKSQCESLNLTGELYWTKVKVNFDNVGAGYLALLQVATFKGWMDIMYAAVDSRGYEEQPQWEYNLYMYIYFVIFIIFGSFFTLNLFIGVIIDNFNQQKKKLGGQDIFMTEEQKKYYNAMKKLGSKKPQKPIPRPLNKYQGFIFDIVTKQAFDVTIMFLICLNMVTMMVETDDQSPEKINILAKINLLFVAIFTGTVLSDIIQKYFFSPTLFRVIRLARIGRILRLIRGAKGIRTLLFALMMSLPALFNIGLLLFLVMFIYSIFGMANFAYVKWEAGIDDMFNFQTFANSMLCLFQITTSAGWDGLLSPILNTGPPYCDPTLPNSNGSRGDCGSPAVGILFFTTYIIISFLIVVNMYIAIILENFSVATEESTEPLSEDDFDMFYEIWEKFDPEATQFIEYSVLSDFADALSEPLRIAKPNQISLINMDLPMVSGDRIHCMDILFAFTKRVLGESGEMDALKIQMEEKFMAANPSKISYEPITTTLRRKHEEVSAMVIQRAFRRHLLQRSLKHASFLFRQQAGSGLSEEDAPEREGLIAYVMSENFSRPLGPPSSSSISSTSFPPSYDSVTRATSDNLQVRGSDYSHSEDLADFPPSPDRDRESIVGSGATNFSLLKQAGDVEENPGMMGRLLALVVGAALVSSACGGCVEVDSETEAVYGMTFKILCISCKRRSETNAETFTEWTFRQKGTEEFVKILRYENEVLQLEEDERFEGRVVWNGSRGTKDLQDLSIFITNVTYNHSGDYECHVYRLLFFENYEHNTSVVKKIHIEVVDKANRDMASIVSEIMMYVLIVVLTIWLVAEMIYCYKKIAAATETAAQENASEYLAITSESKENCTGVQVAEGSGATNFSLLKQAGDVEENPGPMHRDAWLPRPAFSLTGLSLFFSLVPPGRSMEVTVPATLNVLNGSDARLPCTFNSCYTVNHKQFSLNWTYQECNNCSEEMFLQFRMKIINLKLERFQDRVEFSGNPSKYDVSVMLRNVQPEDEGIYNCYIMNPPDRHRGHGKIHLQVLMEEPPERDSTVAVIVGASVGGFLAVVILVLMVVKCVRRKKEQKLSTDDLKTEEEGKTDGEGNPDDGAKGSGATNFSLLKQAGDVEENPGPMPAFNRLFPLASLVLIYWVSVCFPVCVEVPSETEAVQGNPMKLRCISCMKREEVEATTVVEWFYRPEGGKDFLIYEYRNGHQEVESPFQGRLQWNGSKDLQDVSITVLNVTLNDSGLYTCNVSREFEFEAHRPFVKTTRLIPLRVTEEAGEDFTSVVSEIMMYILLVFLTLWLLIEMIYCYRKVSKAEEAAQENASDYLAIPSENKENSAVPVEE

SEQ ID NO: 49 - protein, 2222 aa, Artificial Sequence
  hNav1.6+P2A+hNavBeta1
MAARLLAPPGPDSFKPFTPESLANIERRIAESKLKKPPKADGSHREDDEDSKPKPNSDLEAGKSLPFIYGDIPQGLVAVPLEDFDPYYLTQKTFVVLNRGKTLFRFSATPALYILSPFNLIRRIAIKILIHSVFSMIIMCTILTNCVFMTFSNPPDWSKNVEYTFTGIYTFESLVKIIARGFCIDGFTFLRDPWNWLDFSVIMMAYITEFVNLGNVSALRTFRVLRALKTISVIPGLKTIVGALIQSVKKLSDVMILTVFCLSVFALIGLQLFMGNLRNKCVVWPINFNESYLENGTKGFDWEEYINNKTNFYTVPGMLEPLLCGNSSDAGQCPEGYQCMKAGRNPNYGYTSFDTFSWAFLALFRLMTQDYWENLYQLTLRAAGKTYMIFFVLVIFVGSFYLVNLILAVVAMAYEEQNQATLEEAEQKEAEFKAMLEQLKKQQEEAQAAAMATSAGTVSEDAIEEEGEEGGGSPRSSSEISKLSSKSAKERRNRRKKRKQKELSEGEEKGDPEKVFKSESEDGMRRKAFRLPDNRIGRKFSIMNQSLLSIPGSPFLSRHNSKSSIFSFRGPGRFRDPGSENEFADDEHSTVEESEGRRDSLFIPIRARERRSSYSGYSGYSQGSRSSRIFPSLRRSVKRNSTVDCNGVVSLIGGPGSHIGGRLLPEATTEVEIKKKGPGSLLVSMDQLASYGRKDRINSIMSVVTNTLVEELEESQRKCPPCWYKFANTFLIWECHPYWIKLKEIVNLIVMDPFVDLAITICIVLNTLFMAMEHHPMTPQFEHVLAVGNLVFTGIFTAEMFLKLIAMDPYYYFQEGWNIFDGFIVSLSLMELSLADVEGLSVLRSFRLLRVFKLAKSWPTLNMLIKIIGNSVGALGNLTLVLAIIVFIFAVVGMQLFGKSYKECVCKINQDCELPRWHMHDFFHSFLIVFRVLCGEWIETMWDCMEVAGQAMCLIVFMMVMVIGNLVVLNLFLALLLSSFSADNLAATDDDGEMNNLQISVIRIKKGVAWTKLKVHAFMQAHFKQREADEVKPLDELYEKKANCIANHTGADIHRNGDFQKNGNGTTSGIGSSVEKYIIDEDHMSFINNPNLTVRVPIAVGESDFENLNTEDVSSESDPEGSKDKLDDTSSSEGSTIDIKPEVEEVPVEQPEEYLDPDACFTEGCVQRFKCCQVNIEEGLGKSWWILRKTCFLIVEHNWFETFIIFMILLSSGALAFEDIYIEQRKTIRTILEYADKVFTYIFILEMLLKWTAYGFVKFFTNAWCWLDFLIVAVSLVSLIANALGYSELGAIKSLRTLRALRPLRALSRFEGMRVVVNALVGAIPSIMNVLLVCLIFWLIFSIMGVNLFAGKYHYCFNETSEIRFEIEDVNNKTECEKLMEGNNTEIRWKNVKINFDNVGAGYLALLQVATFKGWMDIMYAAVDSRKPDEQPKYEDNIYMYIYFVIFIIFGSFFTLNLFIGVIIDNFNQQKKKFGGQDIFMTEEQKKYYNAMKKLGSKKPQKPIPRPLNKIQGIVFDFVTQQAFDIVIMMLICLNMVTMMVETDTQSKQMENILYWINLVFVIFFTCECVLKMFALRHYYFTIGWNIFDFVVVILSIVGMFLADIIEKYFVSPTLFRVIRLARIGRILRLIKGAKGIRTLLFALMMSLPALFNIGLLLFLVMFIFSIFGMSNFAYVKHEAGIDDMFNFETFGNSMICLFQITTSAGWDGLLLPILNRPPDCSLDKEHPGSGFKGDCGNPSVGIFFFVSYIIISFLIVVNMYIAIILENFSVATEESADPLSEDDFETFYEIWEKFDPDATQFIEYCKLADFADALEHPLRVPKPNTIELIAMDLPMVSGDRIHCLDILFAFTKRVLGDSGELDILRQQMEERFVASNPSKVSYEPITTTLRRKQEEVSAVVLQRAYRGHLARRGFICKKTTSNKLENGGTHREKKESTPSTASLPSYDSVTKPEKEKQQRAEEGRRERAKRQKEVRESKCGSGATNFSLLKQAGDVEENPGPMMMGRLLALVVGAALVSSACGGCVEVDSETEAVYGMTFKILCISCKRRSETNAETFTEWTFRQKGTEEFVKILRYENEVLQLEEDERFEGRVVWNGSRGTKDLQDLSIFITNVTYNHSGDYECHVYRLLFFENYEHNTSVVKKIHIEVVDKANRDMASIVSEIMMYVLIVVLTIWLVAEMIYCYKKIAAATETAAQENASEYLAITSESKENCTGVQVAE

SEQ ID NO: 50 - protein, 2459 aa, Artificial Sequence
  hNav1.6+P2A+hNavBeta1+P2A+hNavBeta2
MAARLLAPPGPDSFKPFTPESLANIERRIAESKLKKPPKADGSHREDDEDSKPKPNSDLEAGKSLPFIYGDIPQGLVAVPLEDFDPYYLTQKTFVVLNRGKTLFRFSATPALYILSPFNLIRRIAIKILIHSVFSMIIMCTILTNCVFMTFSNPPDWSKNVEYTFTGIYTFESLVKIIARGFCIDGFTFLRDPWNWLDFSVIMMAYITEFVNLGNVSALRTFRVLRALKTISVIPGLKTIVGALIQSVKKLSDVMILTVFCLSVFALIGLQLFMGNLRNKCVVWPINFNESYLENGTKGFDWEEYINNKTNFYTVPGMLEPLLCGNSSDAGQCPEGYQCMKAGRNPNYGYTSFDTFSWAFLALFRLMTQDYWENLYQLTLRAAGKTYMIFFVLVIFVGSFYLVNLILAVVAMAYEEQNQATLEEAEQKEAEFKAMLEQLKKQQEEAQAAAMATSAGTVSEDAIEEEGEEGGGSPRSSSEISKLSSKSAKERRNRRKKRKQKELSEGEEKGDPEKVFKSESEDGMRRKAFRLPDNRIGRKFSIMNQSLLSIPGSPFLSRHNSKSSIFSFRGPGRFRDPGSENEFADDEHSTVEESEGRRDSLFIPIRARERRSSYSGYSGYSQGSRSSRIFPSLRRSVKRNSTVDCNGVVSLIGGPGSHIGGRLLPEATTEVEIKKKGPGSLLVSMDQLASYGRKDRINSIMSVVTNTLVEELEESQRKCPPCWYKFANTFLIWECHPYWIKLKEIVNLIVMDPFVDLAITICIVLNTLFMAMEHHPMTPQFEHVLAVGNLVFTGIFTAEMFLKLIAMDPYYYFQEGWNIFDGFIVSLSLMELSLADVEGLSVLRSFRLLRVFKLAKSWPTLNMLIKIIGNSVGALGNLTLVLAIIVFIFAVVGMQLFGKSYKECVCKINQDCELPRWHMHDFFHSFLIVFRVLCGEWIETMWDCMEVAGQAMCLIVFMMVMVIGNLVVLNLFLALLLSSFSADNLAATDDDGEMNNLQISVIRIKKGVAWTKLKVHAFMQAHFKQREADEVKPLDELYEKKANCIANHTGADIHRNGDFQKNGNGTTSGIGSSVEKYIIDEDHMSFINNPNLTVRVPIAVGESDFENLNTEDVSSESDPEGSKDKLDDTSSSEGSTIDIKPEVEEVPVEQPEEYLDPDACFTEGCVQRFKCCQVNIEEGLGKSWWILRKTCFLIVEHNWFETFIIFMILLSSGALAFEDIYIEQRKTIRTILEYADKVFTYIFILEMLLKWTAYGFVKFFTNAWCWLDFLIVAVSLVSLIANALGYSELGAIKSLRTLRALRPLRALSRFEGMRVVVNALVGAIPSIMNVLLVCLIFWLIFSIMGVNLFAGKYHYCFNETSEIRFEIEDVNNKTECEKLMEGNNTEIRWKNVKINFDNVGAGYLALLQVATFKGWMDIMYAAVDSRKPDEQPKYEDNIYMYIYFVIFIIFGSFFTLNLFIGVIIDNFNQQKKKFGGQDIFMTEEQKKYYNAMKKLGSKKPQKPIPRPLNKIQGIVFDFVTQQAFDIVIMMLICLNMVTMMVETDTQSKQMENILYWINLVFVIFFTCECVLKMFALRHYYFTIGWNIFDFVVVILSIVGMFLADIIEKYFVSPTLFRVIRLARIGRILRLIKGAKGIRTLLFALMMSLPALFNIGLLLFLVMFIFSIFGMSNFAYVKHEAGIDDMFNFETFGNSMICLFQITTSAGWDGLLLPILNRPPDCSLDKEHPGSGFKGDCGNPSVGIFFFVSYIIISFLIVVNMYIAIILENFSVATEESADPLSEDDFETFYEIWEKFDPDATQFIEYCKLADFADALEHPLRVPKPNTIELIAMDLPMVSGDRIHCLDILFAFTKRVLGDSGELDILRQQMEERFVASNPSKVSYEPITTTLRRKQEEVSAVVLQRAYRGHLARRGFICKKTTSNKLENGGTHREKKESTPSTASLPSYDSVTKPEKEKQQRAEEGRRERAKRQKEVRESKCGSGATNFSLLKQAGDVEENPGPMMMGRLLALVVGAALVSSACGGCVEVDSETEAVYGMTFKILCISCKRRSETNAETFTEWTFRQKGTEEFVKILRYENEVLQLEEDERFEGRVVWNGSRGTKDLQDLSIFITNVTYNHSGDYECHVYRLLFFENYEHNTSVVKKIHIEVVDKANRDMASIVSEIMMYVLIVVLTIWLVAEMIYCYKKIAAATETAAQENASEYLAITSESKENCTGVQVAEGSGATNFSLLKQAGDVEENPGPMHRDAWLPRPAFSLTGLSLFFSLVPPGRSMEVTVPATLNVLNGSDARLPCTFNSCYTVNHKQFSLNWTYQECNNCSEEMFLQFRMKIINLKLERFQDRVEFSGNPSKYDVSVMLRNVQPEDEGIYNCYIMNPPDRHRGHGKIHLQVLMEEPPERDSTVAVIVGASVGGFLAVVILVLMVVKCVRRKKEQKLSTDDLKTEEEGKTDGEGNPDDGAK

SEQ ID NO: 51 - protein, 2694 aa, Artificial Sequence
  hNav1.6+P2A+hNavBeta1+P2A+hNavBeta2+P2A+hNavBeta3
MAARLLAPPGPDSFKPFTPESLANIERRIAESKLKKPPKADGSHREDDEDSKPKPNSDLEAGKSLPFIYGDIPQGLVAVPLEDFDPYYLTQKTFVVLNRGKTLFRFSATPALYILSPFNLIRRIAIKILIHSVFSMIIMCTILTNCVFMTFSNPPDWSKNVEYTFTGIYTFESLVKIIARGFCIDGFTFLRDPWNWLDFSVIMMAYITEFVNLGNVSALRTFRVLRALKTISVIPGLKTIVGALIQSVKKLSDVMILTVFCLSVFALIGLQLFMGNLRNKCVVWPINFNESYLENGTKGFDWEEYINNKTNFYTVPGMLEPLLCGNSSDAGQCPEGYQCMKAGRNPNYGYTSFDTFSWAFLALFRLMTQDYWENLYQLTLRAAGKTYMIFFVLVIFVGSFYLVNLILAVVAMAYEEQNQATLEEAEQKEAEFKAMLEQLKKQQEEAQAAAMATSAGTVSEDAIEEEGEEGGGSPRSSSEISKLSSKSAKERRNRRKKRKQKELSEGEEKGDPEKVFKSESEDGMRRKAFRLPDNRIGRKFSIMNQSLLSIPGSPFLSRHNSKSSIFSFRGPGRFRDPGSENEFADDEHSTVEESEGRRDSLFIPIRARERRSSYSGYSGYSQGSRSSRIFPSLRRSVKRNSTVDCNGVVSLIGGPGSHIGGRLLPEATTEVEIKKKGPGSLLVSMDQLASYGRKDRINSIMSVVTNTLVEELEESQRKCPPCWYKFANTFLIWECHPYWIKLKEIVNLIVMDPFVDLAITICIVLNTLFMAMEHHPMTPQFEHVLAVGNLVFTGIFTAEMFLKLIAMDPYYYFQEGWNIFDGFIVSLSLMELSLADVEGLSVLRSFRLLRVFKLAKSWPTLNMLIKIIGNSVGALGNLTLVLAIIVFIFAVVGMQLFGKSYKECVCKINQDCELPRWHMHDFFHSFLIVFRVLCGEWIETMWDCMEVAGQAMCLIVFMMVMVIGNLVVLNLFLALLLSSFSADNLAATDDDGEMNNLQISVIRIKKGVAWTKLKVHAFMQAHFKQREADEVKPLDELYEKKANCIANHTGADIHRNGDFQKNGNGTTSGIGSSVEKYIIDEDHMSFINNPNLTVRVPIAVGESDFENLNTEDVSSESDPEGSKDKLDDTSSSEGSTIDIKPEVEEVPVEQPEEYLDPDACFTEGCVQRFKCCQVNIEEGLGKSWWILRKTCFLIVEHNWFETFIIFMILLSSGALAFEDIYIEQRKTIRTILEYADKVFTYIFILEMLLKWTAYGFVKFFTNAWCWLDFLIVAVSLVSLIANALGYSELGAIKSLRTLRALRPLRALSRFEGMRVVVNALVGAIPSIMNVLLVCLIFWLIFSIMGVNLFAGKYHYCFNETSEIRFEIEDVNNKTECEKLMEGNNTEIRWKNVKINFDNVGAGYLALLQVATFKGWMDIMYAAVDSRKPDEQPKYEDNIYMYIYFVIFIIFGSFFTLNLFIGVIIDNFNQQKKKFGGQDIFMTEEQKKYYNAMKKLGSKKPQKPIPRPLNKIQGIVFDFVTQQAFDIVIMMLICLNMVTMMVETDTQSKQMENILYWINLVFVIFFTCECVLKMFALRHYYFTIGWNIFDFVVVILSIVGMFLADIIEKYFVSPTLFRVIRLARIGRILRLIKGAKGIRTLLFALMMSLPALFNIGLLLFLVMFIFSIFGMSNFAYVKHEAGIDDMFNFETFGNSMICLFQITTSAGWDGLLLPILNRPPDCSLDKEHPGSGFKGDCGNPSVGIFFFVSYIIISFLIVVNMYIAIILENFSVATEESADPLSEDDFETFYEIWEKFDPDATQFIEYCKLADFADALEHPLRVPKPNTIELIAMDLPMVSGDRIHCLDILFAFTKRVLGDSGELDILRQQMEERFVASNPSKVSYEPITTTLRRKQEEVSAVVLQRAYRGHLARRGFICKKTTSNKLENGGTHREKKESTPSTASLPSYDSVTKPEKEKQQRAEEGRRERAKRQKEVRESKCGSGATNFSLLKQAGDVEENPGMMGRLLALVVGAALVSSACGGCVEVDSETEAVYGMTFKILCISCKRRSETNAETFTEWTFRQKGTEEFVKILRYENEVLQLEEDERFEGRVVWNGSRGTKDLQDLSIFITNVTYNHSGDYECHVYRLLFFENYEHNTSVVKKIHIEVVDKANRDMASIVSEIMMYVLIVVLTIWLVAEMIYCYKKIAAATETAAQENASEYLAITSESKENCTGVQVAEGSGATNFSLLKQAGDVEENPGPMHRDAWLPRPAFSLTGLSLFFSLVPPGRSMEVTVPATLNVLNGSDARLPCTFNSCYTVNHKQFSLNWTYQECNNCSEEMFLQFRMKIINLKLERFQDRVEFSGNPSKYDVSVMLRNVQPEDEGIYNCYIMNPPDRHRGHGKIHLQVLMEEPPERDSTVAVIVGASVGGFLAVVILVLMVVKCVRRKKEQKLSTDDLKTEEEGKTDGEGNPDDGAKGSGATNFSLLKQAGDVEENPGPMPAFNRLFPLASLVLIYWVSVCFPVCVEVPSETEAVQGNPMKLRCISCMKREEVEATTVVEWFYRPEGGKDFLIYEYRNGHQEVESPFQGRLQWNGSKDLQDVSITVLNVTLNDSGLYTCNVSREFEFEAHRPFVKTTRLIPLRVTEEAGEDFTSVVSEIMMYILLVFLTLWLLIEMIYCYRKVSKAEEAAQENASDYLAIPSENKENSAVPVEE

SEQ ID NO: 52 - protein, 2219 aa, Artificial Sequence
  hNav1.7+P2A+hNavBeta1
MAMLPPPGPQSFVHFTKQSLALIEQRIAERKSKEPKEEKKDDDEEAPKPSSDLEAGKQLPFIYGDIPPGMVSEPLEDLDPYYADKKTFIVLNKGKTIFRFNATPALYMLSPFSPLRRISIKILVHSLFSMLIMCTILTNCIFMTMNNPPDWTKNVEYTFTGIYTFESLVKILARGFCVGEFTFLRDPWNWLDFVVIVFAYLTEFVNLGNVSALRTFRVLRALKTISVIPGLKTIVGALIQSVKKLSDVMILTVFCLSVFALIGLQLFMGNLKHKCFRNSLENNETLESIMNTLESEEDFRKYFYYLEGSKDALLCGFSTDSGQCPEGYTCVKIGRNPDYGYTSFDTFSWAFLALFRLMTQDYWENLYQQTLRAAGKTYMIFFVVVIFLGSFYLINLILAVVAMAYEEQNQANIEEAKQKELEFQQMLDRLKKEQEEAEAIAAAAAEYTSIRRSRIMGLSESSSETSKLSSKSAKERRNRRKKKNQKKLSSGEEKGDAEKLSKSESEDSIRRKSFHLGVEGHRRAHEKRLSTPNQSPLSIRGSLFSARRSSRTSLFSFKGRGRDIGSETEFADDEHSIFGDNESRRGSLFVPHRPQERRSSNISQASRSPPMLPVNGKMHSAVDCNGVVSLVDGRSALMLPNGQLLPEGTTNQIHKKRRCSSYLLSEDMLNDPNLRQRAMSRASILTNTVEELEESRQKCPPWWYRFAHKFLIWNCSPYWIKFKKCIYFIVMDPFVDLAITICIVLNTLFMAMEHHPMTEEFKNVLAIGNLVFTGIFAAEMVLKLIAMDPYEYFQVGWNIFDSLIVTLSLVELFLADVEGLSVLRSFRLLRVFKLAKSWPTLNMLIKIIGNSVGALGNLTLVLAIIVFIFAVVGMQLFGKSYKECVCKINDDCTLPRWHMNDFFHSFLIVFRVLCGEWIETMWDCMEVAGQAMCLIVYMMVMVIGNLVVLNLFLALLLSSFSSDNLTAIEEDPDANNLQIAVTRIKKGINYVKQTLREFILKAFSKKPKISREIRQAEDLNTKKENYISNHTLAEMSKGHNFLKEKDKISGFGSSVDKHLMEDSDGQSFIHNPSLTVTVPIAPGESDLENMNAEELSSDSDSEYSKVRLNRSSSSECSTVDNPLPGEGEEAEAEPMNSDEPEACFTDGCVRRFSCCQVNIESGKGKIWWNIRKTCYKIVEHSWFESFIVLMILLSSGALAFEDIYIERKKTIKIILEYADKIFTYIFILEMLLKWIAYGYKTYFTNAWCWLDFLIVDVSLVTLVANTLGYSDLGPIKSLRTLRALRPLRALSRFEGMRVVVNALIGAIPSIMNVLLVCLIFWLIFSIMGVNLFAGKFYECINTTDGSRFPASQVPNRSECFALMNVSQNVRWKNLKVNFDNVGLGYLSLLQVATFKGWTIIMYAAVDSVNVDKQPKYEYSLYMYIYFVVFIIFGSFFTLNLFIGVIIDNFNQQKKKLGGQDIFMTEEQKKYYNAMKKLGSKKPQKPIPRPGNKIQGCIFDLVTNQAFDISIMVLICLNMVTMMVEKEGQSQHMTEVLYWINVVFIILFTGECVLKLISLRHYYFTVGWNIFDFVVVIISIVGMFLADLIETYFVSPTLFRVIRLARIGRILRLVKGAKGIRTLLFALMMSLPALFNIGLLLFLVMFIYAIFGMSNFAYVKKEDGINDMFNFETFGNSMICLFQITTSAGWDGLLAPILNSKPPDCDPKKVHPGSSVEGDCGNPSVGIFYFVSYIIISFLVVVNMYIAVILENFSVATEESTEPLSEDDFEMFYEVWEKFDPDATQFIEFSKLSDFAAALDPPLLIAKPNKVQLIAMDLPMVSGDRIHCLDILFAFTKRVLGESGEMDSLRSQMEERFMSANPSKVSYEPITTTLKRKQEDVSATVIQRAYRRYRLRQNVKNISSIYIKDGDRDDDLLNKKDMAFDNVNENSSPEKTDATSSTTSPPSYDSVTKPDKEKYEQDRTEKEDKGKDSKESKKGSGATNFSLLKQAGDVEENPGPMMMGRLLALVVGAALVSSACGGCVEVDSETEAVYGMTFKILCISCKRRSETNAETFTEWTFRQKGTEEFVKILRYENEVLQLEEDERFEGRVVWNGSRGTKDLQDLSIFITNVTYNHSGDYECHVYRLLFFENYEHNTSVVKKIHIEVVDKANRDMASIVSEIMMYVLIVVLTIWLVAEMIYCYKKIAAATETAAQENASEYLAITSESKENCTGVQVAE

SEQ ID NO: 53 - protein, 2456 aa, Artificial Sequence
  hNav1.7+P2A+hNavBeta1+P2A+hNavBeta2
MAMLPPPGPQSFVHFTKQSLALIEQRIAERKSKEPKEEKKDDDEEAPKPSSDLEAGKQLPFIYGDIPPGMVSEPLEDLDPYYADKKTFIVLNKGKTIFRFNATPALYMLSPFSPLRRISIKILVHSLFSMLIMCTILTNCIFMTMNNPPDWTKNVEYTFTGIYTFESLVKILARGFCVGEFTFLRDPWNWLDFVVIVFAYLTEFVNLGNVSALRTFRVLRALKTISVIPGLKTIVGALIQSVKKLSDVMILTVFCLSVFALIGLQLFMGNLKHKCFRNSLENNETLESIMNTLESEEDFRKYFYYLEGSKDALLCGFSTDSGQCPEGYTCVKIGRNPDYGYTSFDTFSWAFLALFRLMTQDYWENLYQQTLRAAGKTYMIFFVVVIFLGSFYLINLILAVVAMAYEEQNQANIEEAKQKELEFQQMLDRLKKEQEEAEAIAAAAAEYTSIRRSRIMGLSESSSETSKLSSKSAKERRNRRKKKNQKKLSSGEEKGDAEKLSKSESEDSIRRKSFHLGVEGHRRAHEKRLSTPNQSPLSIRGSLFSARRSSRTSLFSFKGRGRDIGSETEFADDEHSIFGDNESRRGSLFVPHRPQERRSSNISQASRSPPMLPVNGKMHSAVDCNGVVSLVDGRSALMLPNGQLLPEGTTNQIHKKRRCSSYLLSEDMLNDPNLRQRAMSRASILTNTVEELEESRQKCPPWWYRFAHKFLIWNCSPYWIKFKKCIYFIVMDPFVDLAITICIVLNTLFMAMEHHPMTEEFKNVLAIGNLVFTGIFAAEMVLKLIAMDPYEYFQVGWNIFDSLIVTLSLVELFLADVEGLSVLRSFRLLRVFKLAKSWPTLNMLIKIIGNSVGALGNLTLVLAIIVFIFAVVGMQLFGKSYKECVCKINDDCTLPRWHMNDFFHSFLIVFRVLCGEWIETMWDCMEVAGQAMCLIVYMMVMVIGNLVVLNLFLALLLSSFSSDNLTAIEEDPDANNLQIAVTRIKKGINYVKQTLREFILKAFSKKPKISREIRQAEDLNTKKENYISNHTLAEMSKGHNFLKEKDKISGFGSSVDKHLMEDSDGQSFIHNPSLTVTVPIAPGESDLENMNAEELSSDSDSEYSKVRLNRSSSSECSTVDNPLPGEGEEAEAEPMNSDEPEACFTDGCVRRFSCCQVNIESGKGKIWWNIRKTCYKIVEHSWFESFIVLMILLSSGALAFEDIYIERKKTIKIILEYADKIFTYIFILEMLLKWIAYGYKTYFTNAWCWLDFLIVDVSLVTLVANTLGYSDLGPIKSLRTLRALRPLRALSRFEGMRVVVNALIGAIPSIMNVLLVCLIFWLIFSIMGVNLFAGKFYECINTTDGSRFPASQVPNRSECFALMNVSQNVRWKNLKVNFDNVGLGYLSLLQVATFKGWTIIMYAAVDSVNVDKQPKYEYSLYMYIYFVVFIIFGSFFTLNLFIGVIIDNFNQQKKKLGGQDIFMTEEQKKYYNAMKKLGSKKPQKPIPRPGNKIQGCIFDLVTNQAFDISIMVLICLNMVTMMVEKEGQSQHMTEVLYWINVVFIILFTGECVLKLISLRHYYFTVGWNIFDFVVVIISIVGMFLADLIETYFVSPTLFRVIRLARIGRILRLVKGAKGIRTLLFALMMSLPALFNIGLLLFLVMFIYAIFGMSNFAYVKKEDGINDMFNFETFGNSMICLFQITTSAGWDGLLAPILNSKPPDCDPKKVHPGSSVEGDCGNPSVGIFYFVSYIIISFLVVVNMYIAVILENFSVATEESTEPLSEDDFEMFYEVWEKFDPDATQFIEFSKLSDFAAALDPPLLIAKPNKVQLIAMDLPMVSGDRIHCLDILFAFTKRVLGESGEMDSLRSQMEERFMSANPSKVSYEPITTTLKRKQEDVSATVIQRAYRRYRLRQNVKNISSIYIKDGDRDDDLLNKKDMAFDNVNENSSPEKTDATSSTTSPPSYDSVTKPDKEKYEQDRTEKEDKGKDSKESKKGSGATNFSLLKQAGDVEENPGPMMMGRLLALVVGAALVSSACGGCVEVDSETEAVYGMTFKILCISCKRRSETNAETFTEWTFRQKGTEEFVKILRYENEVLQLEEDERFEGRVVWNGSRGTKDLQDLSIFITNVTYNHSGDYECHVYRLLFFENYEHNTSVVKKIHIEVVDKANRDMASIVSEIMMYVLIVVLTIWLVAEMIYCYKKIAAATETAAQENASEYLAITSESKENCTGVQVAEGSGATNFSLLKQAGDVEENPGPMHRDAWLPRPAFSLTGLSLFFSLVPPGRSMEVTVPATLNVLNGSDARLPCTFNSCYTVNHKQFSLNWTYQECNNCSEEMFLQFRMKIINLKLERFQDRVEFSGNPSKYDVSVMLRNVQPEDEGIYNCYIMNPPDRHRGHGKIHLQVLMEEPPERDSTVAVIVGASVGGFLAVVILVLMVVKCVRRKKEQKLSTDDLKTEEEGKTDGEGNPDDGAK

SEQ ID NO: 54 - protein, 2691 aa, Artificial Sequence
  hNav1.7+P2A+hNavBeta1+P2A+hNavBeta2+P2A+hNavBeta3
MAMLPPPGPQSFVHFTKQSLALIEQRIAERKSKEPKEEKKDDDEEAPKPSSDLEAGKQLPFIYGDIPPGMVSEPLEDLDPYYADKKTFIVLNKGKTIFRFNATPALYMLSPFSPLRRISIKILVHSLFSMLIMCTILTNCIFMTMNNPPDWTKNVEYTFTGIYTFESLVKILARGFCVGEFTFLRDPWNWLDFVVIVFAYLTEFVNLGNVSALRTFRVLRALKTISVIPGLKTIVGALIQSVKKLSDVMILTVFCLSVFALIGLQLFMGNLKHKCFRNSLENNETLESIMNTLESEEDFRKYFYYLEGSKDALLCGFSTDSGQCPEGYTCVKIGRNPDYGYTSFDTFSWAFLALFRLMTQDYWENLYQQTLRAAGKTYMIFFVVVIFLGSFYLINLILAVVAMAYEEQNQANIEEAKQKELEFQQMLDRLKKEQEEAEAIAAAAAEYTSIRRSRIMGLSESSSETSKLSSKSAKERRNRRKKKNQKKLSSGEEKGDAEKLSKSESEDSIRRKSFHLGVEGHRRAHEKRLSTPNQSPLSIRGSLFSARRSSRTSLFSFKGRGRDIGSETEFADDEHSIFGDNESRRGSLFVPHRPQERRSSNISQASRSPPMLPVNGKMHSAVDCNGVVSLVDGRSALMLPNGQLLPEGTTNQIHKKRRCSSYLLSEDMLNDPNLRQRAMSRASILTNTVEELEESRQKCPPWWYRFAHKFLIWNCSPYWIKFKKCIYFIVMDPFVDLAITICIVLNTLFMAMEHHPMTEEFKNVLAIGNLVFTGIFAAEMVLKLIAMDPYEYFQVGWNIFDSLIVTLSLVELFLADVEGLSVLRSFRLLRVFKLAKSWPTLNMLIKIIGNSVGALGNLTLVLAIIVFIFAVVGMQLFGKSYKECVCKINDDCTLPRWHMNDFFHSFLIVFRVLCGEWIETMWDCMEVAGQAMCLIVYMMVMVIGNLVVLNLFLALLLSSFSSDNLTAIEEDPDANNLQIAVTRIKKGINYVKQTLREFILKAFSKKPKISREIRQAEDLNTKKENYISNHTLAEMSKGHNFLKEKDKISGFGSSVDKHLMEDSDGQSFIHNPSLTVTVPIAPGESDLENMNAEELSSDSDSEYSKVRLNRSSSSECSTVDNPLPGEGEEAEAEPMNSDEPEACFTDGCVRRFSCCQVNIESGKGKIWWNIRKTCYKIVEHSWFESFIVLMILLSSGALAFEDIYIERKKTIKIILEYADKIFTYIFILEMLLKWIAYGYKTYFTNAWCWLDFLIVDVSLVTLVANTLGYSDLGPIKSLRTLRALRPLRALSRFEGMRVVVNALIGAIPSIMNVLLVCLIFWLIFSIMGVNLFAGKFYECINTTDGSRFPASQVPNRSECFALMNVSQNVRWKNLKVNFDNVGLGYLSLLQVATFKGWTIIMYAAVDSVNVDKQPKYEYSLYMYIYFVVFIIFGSFFTLNLFIGVIIDNFNQQKKKLGGQDIFMTEEQKKYYNAMKKLGSKKPQKPIPRPGNKIQGCIFDLVTNQAFDISIMVLICLNMVTMMVEKEGQSQHMTEVLYWINVVFIILFTGECVLKLISLRHYYFTVGWNIFDFVVVIISIVGMFLADLIETYFVSPTLFRVIRLARIGRILRLVKGAKGIRTLLFALMMSLPALFNIGLLLFLVMFIYAIFGMSNFAYVKKEDGINDMFNFETFGNSMICLFQITTSAGWDGLLAPILNSKPPDCDPKKVHPGSSVEGDCGNPSVGIFYFVSYIIISFLVVVNMYIAVILENFSVATEESTEPLSEDDFEMFYEVWEKFDPDATQFIEFSKLSDFAAALDPPLLIAKPNKVQLIAMDLPMVSGDRIHCLDILFAFTKRVLGESGEMDSLRSQMEERFMSANPSKVSYEPITTTLKRKQEDVSATVIQRAYRRYRLRQNVKNISSIYIKDGDRDDDLLNKKDMAFDNVNENSSPEKTDATSSTTSPPSYDSVTKPDKEKYEQDRTEKEDKGKDSKESKKGSGATNFSLLKQAGDVEENPGMMGRLLALVVGAALVSSACGGCVEVDSETEAVYGMTFKILCISCKRRSETNAETFTEWTFRQKGTEEFVKILRYENEVLQLEEDERFEGRVVWNGSRGTKDLQDLSIFITNVTYNHSGDYECHVYRLLFFENYEHNTSVVKKIHIEVVDKANRDMASIVSEIMMYVLIVVLTIWLVAEMIYCYKKIAAATETAAQENASEYLAITSESKENCTGVQVAEGSGATNFSLLKQAGDVEENPGPMHRDAWLPRPAFSLTGLSLFFSLVPPGRSMEVTVPATLNVLNGSDARLPCTFNSCYTVNHKQFSLNWTYQECNNCSEEMFLQFRMKIINLKLERFQDRVEFSGNPSKYDVSVMLRNVQPEDEGIYNCYIMNPPDRHRGHGKIHLQVLMEEPPERDSTVAVIVGASVGGFLAVVILVLMVVKCVRRKKEQKLSTDDLKTEEEGKTDGEGNPDDGAKGSGATNFSLLKQAGDVEENPGPMPAFNRLFPLASLVLIYWVSVCFPVCVEVPSETEAVQGNPMKLRCISCMKREEVEATTVVEWFYRPEGGKDFLIYEYRNGHQEVESPFQGRLQWNGSKDLQDVSITVLNVTLNDSGLYTCNVSREFEFEAHRPFVKTTRLIPLRVTEEAGEDFTSVVSEIMMYILLVFLTLWLLIEMIYCYRKVSKAEEAAQENASDYLAIPSENKENSAVPVEE

SEQ ID NO: 55 - protein, 2198 aa, Artificial Sequence
  hNav1.8+P2A+hNavBeta1
MEFPIGSLETNNFRRFTPESLVEIEKQIAAKQGTKKAREKHREQKDQEEKPRPQLDLKACNQLPKFYGELPAELIGEPLEDLDPFYSTHRTFMVLNKGRTISRFSATRALWLFSPFNLIRRTAIKVSVHSWFSLFITVTILVNCVCMTRTDLPEKIEYVFTVIYTFEALIKILARGFCLNEFTYLRDPWNWLDFSVITLAYVGTAIDLRGISGLRTFRVLRALKTVSVIPGLKVIVGALIHSVKKLADVTILTIFCLSVFALVGLQLFKGNLKNKCVKNDMAVNETTNYSSHRKPDIYINKRGTSDPLLCGNGSDSGHCPDGYICLKTSDNPDFNYTSFDSFAWAFLSLFRLMTQDSWERLYQQTLRTSGKIYMIFFVLVIFLGSFYLVNLILAVVTMAYEEQNQATTDEIEAKEKKFQEALEMLRKEQEVLAALGIDTTSLHSHNGSPLTSKNASERRHRIKPRVSEGSTEDNKSPRSDPYNQRRMSFLGLASGKRRASHGSVFHFRSPGRDISLPEGVTDDGVFPGDHESHRGSLLLGGGAGQQGPLPRSPLPQPSNPDSRHGEDEHQPPPTSELAPGAVDVSAFDAGQKKTFLSAEYLDEPFRAQRAMSVVSIITSVLEELEESEQKCPPCLTSLSQKYLIWDCCPMWVKLKTILFGLVTDPFAELTITLCIVVNTIFMAMEHHGMSPTFEAMLQIGNIVFTIFFTAEMVFKIIAFDPYYYFQKKWNIFDCIIVTVSLLELGVAKKGSLSVLRSFRLLRVFKLAKSWPTLNTLIKIIGNSVGALGNLTIILAIIVFVFALVGKQLLGENYRNNRKNISAPHEDWPRWHMHDFFHSFLIVFRILCGEWIENMWACMEVGQKSICLILFLTVMVLGNLVVLNLFIALLLNSFSADNLTAPEDDGEVNNLQVALARIQVFGHRTKQALCSFFSRSCPFPQPKAEPELVVKLPLSSSKAENHIAANTARGSSGGLQAPRGPRDEHSDFIANPTVWVSVPIAEGESDLDDLEDDGGEDAQSFQQEVIPKGQQEQLQQVERCGDHLTPRSPGTGTSSEDLAPSLGETWKDESVPQVPAEGVDDTSSSEGSTVDCLDPEEILRKIPELADDLEEPDDCFTEGCIRHCPCCKLDTTKSPWDVGWQVRKTCYRIVEHSWFESFIIFMILLSSGSLAFEDYYLDQKPTVKALLEYTDRVFTFIFVFEMLLKWVAYGFKKYFTNAWCWLDFLIVNISLISLTAKILEYSEVAPIKALRTLRALRPLRALSRFEGMRVVVDALVGAIPSIMNVLLVCLIFWLIFSIMGVNLFAGKFWRCINYTDGEFSLVPLSIVNNKSDCKIQNSTGSFFWVNVKVNFDNVAMGYLALLQVATFKGWMDIMYAAVDSREVNMQPKWEDNVYMYLYFVIFIIFGGFFTLNLFVGVIIDNFNQQKKKLGGQDIFMTEEQKKYYNAMKKLGSKKPQKPIPRPLNKFQGFVFDIVTRQAFDITIMVLICLNMITMMVETDDQSEEKTKILGKINQFFVAVFTGECVMKMFALRQYYFTNGWNVFDFIVVVLSIASLIFSAILKSLQSYFSPTLFRVIRLARIGRILRLIRAAKGIRTLLFALMMSLPALFNIGLLLFLVMFIYSIFGMSSFPHVRWEAGIDDMFNFQTFANSMLCLFQITTSAGWDGLLSPILNTGPPYCDPNLPNSNGTRGDCGSPAVGIIFFTTYIIISFLIMVNMYIAVILENFNVATEESTEPLSEDDFDMFYETWEKFDPEATQFITFSALSDFADTLSGPLRIPKPNRNILIQMDLPLVPGDKIHCLDILFAFTKNVLGESGELDSLKANMEEKFMATNLSKSSYEPIATTLRWKQEDISATVIQKAYRSYVLHRSMALSNTPCVPRAEEEAASLPDEGFVAFTANENCVLPDKSETASATSFPPSYESVTRGLSDRVNMRTSSSIQNEDEATSMELIAPGPGSGATNFSLLKQAGDVEENPGPMMMGRLLALVVGAALVSSACGGCVEVDSETEAVYGMTFKILCISCKRRSETNAETFTEWTFRQKGTEEFVKILRYENEVLQLEEDERFEGRVVWNGSRGTKDLQDLSIFITNVTYNHSGDYECHVYRLLFFENYEHNTSVVKKIHIEVVDKANRDMASIVSEIMMYVLIVVLTIWLVAEMIYCYKKIAAATETAAQENASEYLAITSESKENCTGVQVAE

SEQ ID NO: 56 - protein, 2435 aa, Artificial Sequence
  hNav1.8+P2A+hNavBeta1+P2A+hNavBeta2
MEFPIGSLETNNFRRFTPESLVEIEKQIAAKQGTKKAREKHREQKDQEEKPRPQLDLKACNQLPKFYGELPAELIGEPLEDLDPFYSTHRTFMVLNKGRTISRFSATRALWLFSPFNLIRRTAIKVSVHSWFSLFITVTILVNCVCMTRTDLPEKIEYVFTVIYTFEALIKILARGFCLNEFTYLRDPWNWLDFSVITLAYVGTAIDLRGISGLRTFRVLRALKTVSVIPGLKVIVGALIHSVKKLADVTILTIFCLSVFALVGLQLFKGNLKNKCVKNDMAVNETTNYSSHRKPDIYINKRGTSDPLLCGNGSDSGHCPDGYICLKTSDNPDFNYTSFDSFAWAFLSLFRLMTQDSWERLYQQTLRTSGKIYMIFFVLVIFLGSFYLVNLILAVVTMAYEEQNQATTDEIEAKEKKFQEALEMLRKEQEVLAALGIDTTSLHSHNGSPLTSKNASERRHRIKPRVSEGSTEDNKSPRSDPYNQRRMSFLGLASGKRRASHGSVFHFRSPGRDISLPEGVTDDGVFPGDHESHRGSLLLGGGAGQQGPLPRSPLPQPSNPDSRHGEDEHQPPPTSELAPGAVDVSAFDAGQKKTFLSAEYLDEPFRAQRAMSVVSIITSVLEELEESEQKCPPCLTSLSQKYLIWDCCPMWVKLKTILFGLVTDPFAELTITLCIVVNTIFMAMEHHGMSPTFEAMLQIGNIVFTIFFTAEMVFKIIAFDPYYYFQKKWNIFDCIIVTVSLLELGVAKKGSLSVLRSFRLLRVFKLAKSWPTLNTLIKIIGNSVGALGNLTIILAIIVFVFALVGKQLLGENYRNNRKNISAPHEDWPRWHMHDFFHSFLIVFRILCGEWIENMWACMEVGQKSICLILFLTVMVLGNLVVLNLFIALLLNSFSADNLTAPEDDGEVNNLQVALARIQVFGHRTKQALCSFFSRSCPFPQPKAEPELVVKLPLSSSKAENHIAANTARGSSGGLQAPRGPRDEHSDFIANPTVWVSVPIAEGESDLDDLEDDGGEDAQSFQQEVIPKGQQEQLQQVERCGDHLTPRSPGTGTSSEDLAPSLGETWKDESVPQVPAEGVDDTSSSEGSTVDCLDPEEILRKIPELADDLEEPDDCFTEGCIRHCPCCKLDTTKSPWDVGWQVRKTCYRIVEHSWFESFIIFMILLSSGSLAFEDYYLDQKPTVKALLEYTDRVFTFIFVFEMLLKWVAYGFKKYFTNAWCWLDFLIVNISLISLTAKILEYSEVAPIKALRTLRALRPLRALSRFEGMRVVVDALVGAIPSIMNVLLVCLIFWLIFSIMGVNLFAGKFWRCINYTDGEFSLVPLSIVNNKSDCKIQNSTGSFFWVNVKVNFDNVAMGYLALLQVATFKGWMDIMYAAVDSREVNMQPKWEDNVYMYLYFVIFIIFGGFFTLNLFVGVIIDNFNQQKKKLGGQDIFMTEEQKKYYNAMKKLGSKKPQKPIPRPLNKFQGFVFDIVTRQAFDITIMVLICLNMITMMVETDDQSEEKTKILGKINQFFVAVFTGECVMKMFALRQYYFTNGWNVFDFIVVVLSIASLIFSAILKSLQSYFSPTLFRVIRLARIGRILRLIRAAKGIRTLLFALMMSLPALFNIGLLLFLVMFIYSIFGMSSFPHVRWEAGIDDMFNFQTFANSMLCLFQITTSAGWDGLLSPILNTGPPYCDPNLPNSNGTRGDCGSPAVGIIFFTTYIIISFLIMVNMYIAVILENFNVATEESTEPLSEDDFDMFYETWEKFDPEATQFITFSALSDFADTLSGPLRIPKPNRNILIQMDLPLVPGDKIHCLDILFAFTKNVLGESGELDSLKANMEEKFMATNLSKSSYEPIATTLRWKQEDISATVIQKAYRSYVLHRSMALSNTPCVPRAEEEAASLPDEGFVAFTANENCVLPDKSETASATSFPPSYESVTRGLSDRVNMRTSSSIQNEDEATSMELIAPGPGSGATNFSLLKQAGDVEENPGPMMMGRLLALVVGAALVSSACGGCVEVDSETEAVYGMTFKILCISCKRRSETNAETFTEWTFRQKGTEEFVKILRYENEVLQLEEDERFEGRVVWNGSRGTKDLQDLSIFITNVTYNHSGDYECHVYRLLFFENYEHNTSVVKKIHIEVVDKANRDMASIVSEIMMYVLIVVLTIWLVAEMIYCYKKIAAATETAAQENASEYLAITSESKENCTGVQVAEGSGATNFSLLKQAGDVEENPGPMHRDAWLPRPAFSLTGLSLFFSLVPPGRSMEVTVPATLNVLNGSDARLPCTFNSCYTVNHKQFSLNWTYQECNNCSEEMFLQFRMKIINLKLERFQDRVEFSGNPSKYDVSVMLRNVQPEDEGIYNCYIMNPPDRHRGHGKIHLQVLMEEPPERDSTVAVIVGASVGGFLAVVILVLMVVKCVRRKKEQKLSTDDLKTEEEGKTDGEGNPDDGAK

SEQ ID NO: 57 - protein, 2670 aa, Artificial Sequence
  hNav1.8+P2A+hNavBeta1+P2A+hNavBeta2+P2A+hNavBeta3
MEFPIGSLETNNFRRFTPESLVEIEKQIAAKQGTKKAREKHREQKDQEEKPRPQLDLKACNQLPKFYGELPAELIGEPLEDLDPFYSTHRTFMVLNKGRTISRFSATRALWLFSPFNLIRRTAIKVSVHSWFSLFITVTILVNCVCMTRTDLPEKIEYVFTVIYTFEALIKILARGFCLNEFTYLRDPWNWLDFSVITLAYVGTAIDLRGISGLRTFRVLRALKTVSVIPGLKVIVGALIHSVKKLADVTILTIFCLSVFALVGLQLFKGNLKNKCVKNDMAVNETTNYSSHRKPDIYINKRGTSDPLLCGNGSDSGHCPDGYICLKTSDNPDFNYTSFDSFAWAFLSLFRLMTQDSWERLYQQTLRTSGKIYMIFFVLVIFLGSFYLVNLILAVVTMAYEEQNQATTDEIEAKEKKFQEALEMLRKEQEVLAALGIDTTSLHSHNGSPLTSKNASERRHRIKPRVSEGSTEDNKSPRSDPYNQRRMSFLGLASGKRRASHGSVFHFRSPGRDISLPEGVTDDGVFPGDHESHRGSLLLGGGAGQQGPLPRSPLPQPSNPDSRHGEDEHQPPPTSELAPGAVDVSAFDAGQKKTFLSAEYLDEPFRAQRAMSVVSIITSVLEELEESEQKCPPCLTSLSQKYLIWDCCPMWVKLKTILFGLVTDPFAELTITLCIVVNTIFMAMEHHGMSPTFEAMLQIGNIVFTIFFTAEMVFKIIAFDPYYYFQKKWNIFDCIIVTVSLLELGVAKKGSLSVLRSFRLLRVFKLAKSWPTLNTLIKIIGNSVGALGNLTIILAIIVFVFALVGKQLLGENYRNNRKNISAPHEDWPRWHMHDFFHSFLIVFRILCGEWIENMWACMEVGQKSICLILFLTVMVLGNLVVLNLFIALLLNSFSADNLTAPEDDGEVNNLQVALARIQVFGHRTKQALCSFFSRSCPFPQPKAEPELVVKLPLSSSKAENHIAANTARGSSGGLQAPRGPRDEHSDFIANPTVWVSVPIAEGESDLDDLEDDGGEDAQSFQQEVIPKGQQEQLQQVERCGDHLTPRSPGTGTSSEDLAPSLGETWKDESVPQVPAEGVDDTSSSEGSTVDCLDPEEILRKIPELADDLEEPDDCFTEGCIRHCPCCKLDTTKSPWDVGWQVRKTCYRIVEHSWFESFIIFMILLSSGSLAFEDYYLDQKPTVKALLEYTDRVFTFIFVFEMLLKWVAYGFKKYFTNAWCWLDFLIVNISLISLTAKILEYSEVAPIKALRTLRALRPLRALSRFEGMRVVVDALVGAIPSIMNVLLVCLIFWLIFSIMGVNLFAGKFWRCINYTDGEFSLVPLSIVNNKSDCKIQNSTGSFFWVNVKVNFDNVAMGYLALLQVATFKGWMDIMYAAVDSREVNMQPKWEDNVYMYLYFVIFIIFGGFFTLNLFVGVIIDNFNQQKKKLGGQDIFMTEEQKKYYNAMKKLGSKKPQKPIPRPLNKFQGFVFDIVTRQAFDITIMVLICLNMITMMVETDDQSEEKTKILGKINQFFVAVFTGECVMKMFALRQYYFTNGWNVFDFIVVVLSIASLIFSAILKSLQSYFSPTLFRVIRLARIGRILRLIRAAKGIRTLLFALMMSLPALFNIGLLLFLVMFIYSIFGMSSFPHVRWEAGIDDMFNFQTFANSMLCLFQITTSAGWDGLLSPILNTGPPYCDPNLPNSNGTRGDCGSPAVGIIFFTTYIIISFLIMVNMYIAVILENFNVATEESTEPLSEDDFDMFYETWEKFDPEATQFITFSALSDFADTLSGPLRIPKPNRNILIQMDLPLVPGDKIHCLDILFAFTKNVLGESGELDSLKANMEEKFMATNLSKSSYEPIATTLRWKQEDISATVIQKAYRSYVLHRSMALSNTPCVPRAEEEAASLPDEGFVAFTANENCVLPDKSETASATSFPPSYESVTRGLSDRVNMRTSSSIQNEDEATSMELIAPGPGSGATNFSLLKQAGDVEENPGMMGRLLALVVGAALVSSACGGCVEVDSETEAVYGMTFKILCISCKRRSETNAETFTEWTFRQKGTEEFVKILRYENEVLQLEEDERFEGRVVWNGSRGTKDLQDLSIFITNVTYNHSGDYECHVYRLLFFENYEHNTSVVKKIHIEVVDKANRDMASIVSEIMMYVLIVVLTIWLVAEMIYCYKKIAAATETAAQENASEYLAITSESKENCTGVQVAEGSGATNFSLLKQAGDVEENPGPMHRDAWLPRPAFSLTGLSLFFSLVPPGRSMEVTVPATLNVLNGSDARLPCTFNSCYTVNHKQFSLNWTYQECNNCSEEMFLQFRMKIINLKLERFQDRVEFSGNPSKYDVSVMLRNVQPEDEGIYNCYIMNPPDRHRGHGKIHLQVLMEEPPERDSTVAVIVGASVGGFLAVVILVLMVVKCVRRKKEQKLSTDDLKTEEEGKTDGEGNPDDGAKGSGATNFSLLKQAGDVEENPGPMPAFNRLFPLASLVLIYWVSVCFPVCVEVPSETEAVQGNPMKLRCISCMKREEVEATTVVEWFYRPEGGKDFLIYEYRNGHQEVESPFQGRLQWNGSKDLQDVSITVLNVTLNDSGLYTCNVSREFEFEAHRPFVKTTRLIPLRVTEEAGEDFTSVVSEIMMYILLVFLTLWLLIEMIYCYRKVSKAEEAAQENASDYLAIPSENKENSAVPVEE

SEQ ID NO: 58 - DNA, 6747 bp, Artificial Sequence
  Polynucleotide encoding hNav1.1+P2A+hNavBeta1
atggagcagaccgtgctggtgccccccggccccgacagcttcaacttcttcaccagagagagcctggccgccatcgagagaagaatcgccgaggagaaggccaagaaccccaagcccgacaagaaggacgacgacgagaacggccccaagcccaacagcgacctggaggccggcaagaacctgcccttcatctacggcgacatcccccccgagatggtgagcgagcccctggaggacctggacccctactacatcaacaagaagaccttcatcgtgctgaacaagggcaaggccatcttcagattcagcgccaccagcgccctgtacatcctgacccccttcaaccccctgagaaagatcgccatcaagatcctggtgcacagcctgttcagcatgctgatcatgtgcaccatcctgaccaactgcgtgttcatgaccatgagcaacccccccgactggaccaagaacgtggagtacaccttcaccggcatctacaccttcgagagcctgatcaagatcatcgccagaggcttctgcctggaggacttcaccttcctgagagacccctggaactggctggacttcaccgtgatcaccttcgcctacgtgaccgagttcgtggacctgggcaacgtgagcgccctgagaaccttcagagtgctgagagccctgaagaccatcagcgtgatccccggcctgaagaccatcgtgggcgccctgatccagagcgtgaagaagctgagcgacgtgatgatcctgaccgtgttctgcctgagcgtgttcgccctgatcggcctgcagctgttcatgggcaacctgagaaacaagtgcatccagtggccccccaccaacgccagcctggaggagcacagcatcgagaagaacatcaccgtgaactacaacggcaccctgatcaacgagaccgtgttcgagttcgactggaagagctacatccaggacagcagataccactacttcctggagggcttcctggacgccctgctgtgcggcaacagcagcgacgccggccagtgccccgagggctacatgtgcgtgaaggccggcagaaaccccaactacggctacaccagcttcgacaccttcagctgggccttcctgagcctgttcagactgatgacccaggacttctgggagaacctgtaccagctgaccctgagagccgccggcaagacctacatgatcttcttcgtgctggtgatcttcctgggcagcttctacctgatcaacctgatcctggccgtggtggccatggcctacgaggagcagaaccaggccaccctggaggaggccgagcagaaggaggccgagttccagcagatgatcgagcagctgaagaagcagcaggaggccgcccagcaggccgccaccgccaccgccagcgagcacagcagagagcccagcgccgccggcagactgagcgacagcagcagcgaggccagcaagctgagcagcaagagcgccaaggagagaagaaacagaagaaagaagagaaagcagaaggagcagagcggcggcgaggagaaggacgaggacgagttccagaagagcgagagcgaggacagcatcagaagaaagggcttcagattcagcatcgagggcaacagactgacctacgagaagagatacagcagcccccaccagagcctgctgagcatcagaggcagcctgttcagccccagaagaaacagcagaaccagcctgttcagcttcagaggcagagccaaggacgtgggcagcgagaacgacttcgccgacgacgagcacagcaccttcgaggacaacgagagcagaagagacagcctgttcgtgcccagaagacacggcgagagaagaaacagcaacctgagccagaccagcagaagcagcagaatgctggccgtgttccccgccaacggcaagatgcacagcaccgtggactgcaacggcgtggtgagcctggtgggcggccccagcgtgcccaccagccccgtgggccagctgctgcccgaggtgatcatcgacaagcccgccaccgacgacaacggcaccaccaccgagaccgagatgagaaagagaagaagcagcagcttccacgtgagcatggacttcctggaggaccccagccagagacagagagccatgagcatcgccagcatcctgaccaacaccgtggaggagctggaggagagcagacagaagtgccccccctgctggtacaagttcagcaacatcttcctgatctgggactgcagcccctactggctgaaggtgaagcacgtggtgaacctggtggtgatggaccccttcgtggacctggccatcaccatctgcatcgtgctgaacaccctgttcatggccatggagcactaccccatgaccgaccacttcaacaacgtgctgaccgtgggcaacctggtgttcaccggcatcttcaccgccgagatgttcctgaagatcatcgccatggacccctactactacttccaggagggctggaacatcttcgacggcttcatcgtgaccctgagcctggtggagctgggcctggccaacgtggagggcctgagcgtgctgagaagcttcagactgctgagagtgttcaagctggccaagagctggcccaccctgaacatgctgatcaagatcatcggcaacagcgtgggcgccctgggcaacctgaccctggtgctggccatcatcgtgttcatcttcgccgtggtgggcatgcagctgttcggcaagagctacaaggactgcgtgtgcaagatcgccagcgactgccagctgcccagatggcacatgaacgacttcttccacagcttcctgatcgtgttcagagtgctgtgcggcgagtggatcgagaccatgtgggactgcatggaggtggccggccaggccatgtgcctgaccgtgttcatgatggtgatggtgatcggcaacctggtggtgctgaacctgttcctggccctgctgctgagcagcttcagcgccgacaacctggccgccaccgacgacgacaacgagatgaacaacctgcagatcgccgtggacagaatgcacaagggcgtggcctacgtgaagagaaagatctacgagttcatccagcagagcttcatcagaaagcagaagatcctggacgagatcaagcccctggacgacctgaacaacaagaaggacagctgcatgagcaaccacaccgccgagatcggcaaggacctggactacctgaaggacgtgaacggcaccaccagcggcatcggcaccggcagcagcgtggagaagtacatcatcgacgagagcgactacatgagcttcatcaacaaccccagcctgaccgtgaccgtgcccatcgccgtgggcgagagcgacttcgagaacctgaacaccgaggacttcagcagcgagagcgacctggaggagagcaaggagaagctgaacgagagcagcagcagcagcgagggcagcaccgtggacatcggcgcccccgtggaggagcagcccgtggtggagcccgaggagaccctggagcccgaggcctgcttcaccgagggctgcgtgcagagattcaagtgctgccagatcaacgtggaggagggcagaggcaagcagtggtggaacctgagaagaacctgcttcagaatcgtggagcacaactggttcgagaccttcatcgtgttcatgatcctgctgagcagcggcgccctggccttcgaggacatctacatcgaccagagaaagaccatcaagaccatgctggagtacgccgacaaggtgttcacctacatcttcatcctggagatgctgctgaagtgggtggcctacggctaccagacctacttcaccaacgcctggtgctggctggacttcctgatcgtggacgtgagcctggtgagcctgaccgccaacgccctgggctacagcgagctgggcgccatcaagagcctgagaaccctgagagccctgagacccctgagagccctgagcagattcgagggcatgagagtggtggtgaacgccctgctgggcgccatccccagcatcatgaacgtgctgctggtgtgcctgatcttctggctgatcttcagcatcatgggcgtgaacctgttcgccggcaagttctaccactgcatcaacaccaccaccggcgacagattcgacatcgaggacgtgaacaaccacaccgactgcctgaagctgatcgagagaaacgagaccgccagatggaagaacgtgaaggtgaacttcgacaacgtgggcttcggctacctgagcctgctgcaggtggccaccttcaagggctggatggacatcatgtacgccgccgtggacagcagaaacgtggagctgcagcccaagtacgaggagagcctgtacatgtacctgtacttcgtgatcttcatcatcttcggcagcttcttcaccctgaacctgttcatcggcgtgatcatcgacaacttcaaccagcagaagaagaagttcggcggccaggacatcttcatgaccgaggagcagaagaagtactacaacgccatgaagaagctgggcagcaagaagccccagaagcccatccccagacccggcaacaagttccagggcatggtgttcgacttcgtgaccagacaggtgttcgacatcagcatcatgatcctgatctgcctgaacatggtgaccatgatggtggagaccgacgaccagagcgagtacgtgaccaccatcctgagcagaatcaacctggtgttcatcgtgctgttcaccggcgagtgcgtgctgaagctgatcagcctgagacactactacttcaccatcggctggaacatcttcgacttcgtggtggtgatcctgagcatcgtgggcatgttcctggccgagctgatcgagaagtacttcgtgagccccaccctgttcagagtgatcagactggccagaatcggcagaatcctgagactgatcaagggcgccaagggcatcagaaccctgctgttcgccctgatgatgagcctgcccgccctgttcaacatcggcctgctgctgttcctggtgatgttcatctacgccatcttcggcatgagcaacttcgcctacgtgaagagagaggtgggcatcgacgacatgttcaacttcgagaccttcggcaacagcatgatctgcctgttccagatcaccaccagcgccggctgggacggcctgctggcccccatcctgaacagcaagccccccgactgcgaccccaacaaggtgaaccccggcagcagcgtgaagggcgactgcggcaaccccagcgtgggcatcttcttcttcgtgagctacatcatcatcagcttcctggtggtggtgaacatgtacatcgccgtgatcctggagaacttcagcgtggccaccgaggagagcgccgagcccctgagcgaggacgacttcgagatgttctacgaggtgtgggagaagttcgaccccgacgccacccagttcatggagttcgagaagctgagccagttcgccgccgccctggagccccccctgaacctgccccagcccaacaagctgcagctgatcgccatggacctgcccatggtgagcggcgacagaatccactgcctggacatcctgttcgccttcaccaagagagtgctgggcgagagcggcgagatggacgccctgagaatccagatggaggagagattcatggccagcaaccccagcaaggtgagctaccagcccatcaccaccaccctgaagagaaagcaggaggaggtgagcgccgtgatcatccagagagcctacagaagacacctgctgaagagaaccgtgaagcaggccagcttcacctacaacaagaacaagatcaagggcggcgccaacctgctgatcaaggaggacatgatcatcgacagaatcaacgagaacagcatcaccgagaagaccgacctgaccatgagcaccgccgcctgcccccccagctacgacagagtgaccaagcccatcgtggagaagcacgagcaggagggcaaggacgagaaggccaagggcaagggaagcggagctactaacttcagcctgctgaagcaggctggagacgtggaggagaaccctggacctatggggaggctgctggccttagtggtcggcgcggcactggtgtcctcagcctgcgggggctgcgtggaggtggactcggagaccgaggccgtgtatgggatgaccttcaaaattctttgcatctcctgcaagcgccgcagcgagaccaacgctgagaccttcaccgagtggaccttccgccagaagggcactgaggagtttgtcaagatcctgcgctatgagaatgaggtgttgcagctggaggaggatgagcgcttcgagggccgcgtggtgtggaatggcagccggggcaccaaagacctgcaggatctgtctatcttcatcaccaatgtcacctacaaccactcgggcgactacgagtgccacgtctaccgcctgctcttcttcgaaaactacgagcacaacaccagcgtcgtcaagaagatccacattgaggtagtggacaaagccaacagagacatggcatccatcgtgtctgagatcatgatgtatgtgctcattgtggtgttgaccatatggctcgtggcagagatgatttactgctacaagaagatcgctgccgccacggagactgctgcacaggagaatgcctcggaatacctggccatcacctctgaaagcaaagagaactgcacgggcgtccaggtggccgaa

SEQ ID NO: 59 - DNA, 7458 bp, Artificial Sequence
  Polynucleotide encoding hNav1.1+P2A+hNavBeta1+P2A+hNavBeta2
atggagcagaccgtgctggtgccccccggccccgacagcttcaacttcttcaccagagagagcctggccgccatcgagagaagaatcgccgaggagaaggccaagaaccccaagcccgacaagaaggacgacgacgagaacggccccaagcccaacagcgacctggaggccggcaagaacctgcccttcatctacggcgacatcccccccgagatggtgagcgagcccctggaggacctggacccctactacatcaacaagaagaccttcatcgtgctgaacaagggcaaggccatcttcagattcagcgccaccagcgccctgtacatcctgacccccttcaaccccctgagaaagatcgccatcaagatcctggtgcacagcctgttcagcatgctgatcatgtgcaccatcctgaccaactgcgtgttcatgaccatgagcaacccccccgactggaccaagaacgtggagtacaccttcaccggcatctacaccttcgagagcctgatcaagatcatcgccagaggcttctgcctggaggacttcaccttcctgagagacccctggaactggctggacttcaccgtgatcaccttcgcctacgtgaccgagttcgtggacctgggcaacgtgagcgccctgagaaccttcagagtgctgagagccctgaagaccatcagcgtgatccccggcctgaagaccatcgtgggcgccctgatccagagcgtgaagaagctgagcgacgtgatgatcctgaccgtgttctgcctgagcgtgttcgccctgatcggcctgcagctgttcatgggcaacctgagaaacaagtgcatccagtggccccccaccaacgccagcctggaggagcacagcatcgagaagaacatcaccgtgaactacaacggcaccctgatcaacgagaccgtgttcgagttcgactggaagagctacatccaggacagcagataccactacttcctggagggcttcctggacgccctgctgtgcggcaacagcagcgacgccggccagtgccccgagggctacatgtgcgtgaaggccggcagaaaccccaactacggctacaccagcttcgacaccttcagctgggccttcctgagcctgttcagactgatgacccaggacttctgggagaacctgtaccagctgaccctgagagccgccggcaagacctacatgatcttcttcgtgctggtgatcttcctgggcagcttctacctgatcaacctgatcctggccgtggtggccatggcctacgaggagcagaaccaggccaccctggaggaggccgagcagaaggaggccgagttccagcagatgatcgagcagctgaagaagcagcaggaggccgcccagcaggccgccaccgccaccgccagcgagcacagcagagagcccagcgccgccggcagactgagcgacagcagcagcgaggccagcaagctgagcagcaagagcgccaaggagagaagaaacagaagaaagaagagaaagcagaaggagcagagcggcggcgaggagaaggacgaggacgagttccagaagagcgagagcgaggacagcatcagaagaaagggcttcagattcagcatcgagggcaacagactgacctacgagaagagatacagcagcccccaccagagcctgctgagcatcagaggcagcctgttcagccccagaagaaacagcagaaccagcctgttcagcttcagaggcagagccaaggacgtgggcagcgagaacgacttcgccgacgacgagcacagcaccttcgaggacaacgagagcagaagagacagcctgttcgtgcccagaagacacggcgagagaagaaacagcaacctgagccagaccagcagaagcagcagaatgctggccgtgttccccgccaacggcaagatgcacagcaccgtggactgcaacggcgtggtgagcctggtgggcggccccagcgtgcccaccagccccgtgggccagctgctgcccgaggtgatcatcgacaagcccgccaccgacgacaacggcaccaccaccgagaccgagatgagaaagagaagaagcagcagcttccacgtgagcatggacttcctggaggaccccagccagagacagagagccatgagcatcgccagcatcctgaccaacaccgtggaggagctggaggagagcagacagaagtgccccccctgctggtacaagttcagcaacatcttcctgatctgggactgcagcccctactggctgaaggtgaagcacgtggtgaacctggtggtgatggaccccttcgtggacctggccatcaccatctgcatcgtgctgaacaccctgttcatggccatggagcactaccccatgaccgaccacttcaacaacgtgctgaccgtgggcaacctggtgttcaccggcatcttcaccgccgagatgttcctgaagatcatcgccatggacccctactactacttccaggagggctggaacatcttcgacggcttcatcgtgaccctgagcctggtggagctgggcctggccaacgtggagggcctgagcgtgctgagaagcttcagactgctgagagtgttcaagctggccaagagctggcccaccctgaacatgctgatcaagatcatcggcaacagcgtgggcgccctgggcaacctgaccctggtgctggccatcatcgtgttcatcttcgccgtggtgggcatgcagctgttcggcaagagctacaaggactgcgtgtgcaagatcgccagcgactgccagctgcccagatggcacatgaacgacttcttccacagcttcctgatcgtgttcagagtgctgtgcggcgagtggatcgagaccatgtgggactgcatggaggtggccggccaggccatgtgcctgaccgtgttcatgatggtgatggtgatcggcaacctggtggtgctgaacctgttcctggccctgctgctgagcagcttcagcgccgacaacctggccgccaccgacgacgacaacgagatgaacaacctgcagatcgccgtggacagaatgcacaagggcgtggcctacgtgaagagaaagatctacgagttcatccagcagagcttcatcagaaagcagaagatcctggacgagatcaagcccctggacgacctgaacaacaagaaggacagctgcatgagcaaccacaccgccgagatcggcaaggacctggactacctgaaggacgtgaacggcaccaccagcggcatcggcaccggcagcagcgtggagaagtacatcatcgacgagagcgactacatgagcttcatcaacaaccccagcctgaccgtgaccgtgcccatcgccgtgggcgagagcgacttcgagaacctgaacaccgaggacttcagcagcgagagcgacctggaggagagcaaggagaagctgaacgagagcagcagcagcagcgagggcagcaccgtggacatcggcgcccccgtggaggagcagcccgtggtggagcccgaggagaccctggagcccgaggcctgcttcaccgagggctgcgtgcagagattcaagtgctgccagatcaacgtggaggagggcagaggcaagcagtggtggaacctgagaagaacctgcttcagaatcgtggagcacaactggttcgagaccttcatcgtgttcatgatcctgctgagcagcggcgccctggccttcgaggacatctacatcgaccagagaaagaccatcaagaccatgctggagtacgccgacaaggtgttcacctacatcttcatcctggagatgctgctgaagtgggtggcctacggctaccagacctacttcaccaacgcctggtgctggctggacttcctgatcgtggacgtgagcctggtgagcctgaccgccaacgccctgggctacagcgagctgggcgccatcaagagcctgagaaccctgagagccctgagacccctgagagccctgagcagattcgagggcatgagagtggtggtgaacgccctgctgggcgccatccccagcatcatgaacgtgctgctggtgtgcctgatcttctggctgatcttcagcatcatgggcgtgaacctgttcgccggcaagttctaccactgcatcaacaccaccaccggcgacagattcgacatcgaggacgtgaacaaccacaccgactgcctgaagctgatcgagagaaacgagaccgccagatggaagaacgtgaaggtgaacttcgacaacgtgggcttcggctacctgagcctgctgcaggtggccaccttcaagggctggatggacatcatgtacgccgccgtggacagcagaaacgtggagctgcagcccaagtacgaggagagcctgtacatgtacctgtacttcgtgatcttcatcatcttcggcagcttcttcaccctgaacctgttcatcggcgtgatcatcgacaacttcaaccagcagaagaagaagttcggcggccaggacatcttcatgaccgaggagcagaagaagtactacaacgccatgaagaagctgggcagcaagaagccccagaagcccatccccagacccggcaacaagttccagggcatggtgttcgacttcgtgaccagacaggtgttcgacatcagcatcatgatcctgatctgcctgaacatggtgaccatgatggtggagaccgacgaccagagcgagtacgtgaccaccatcctgagcagaatcaacctggtgttcatcgtgctgttcaccggcgagtgcgtgctgaagctgatcagcctgagacactactacttcaccatcggctggaacatcttcgacttcgtggtggtgatcctgagcatcgtgggcatgttcctggccgagctgatcgagaagtacttcgtgagccccaccctgttcagagtgatcagactggccagaatcggcagaatcctgagactgatcaagggcgccaagggcatcagaaccctgctgttcgccctgatgatgagcctgcccgccctgttcaacatcggcctgctgctgttcctggtgatgttcatctacgccatcttcggcatgagcaacttcgcctacgtgaagagagaggtgggcatcgacgacatgttcaacttcgagaccttcggcaacagcatgatctgcctgttccagatcaccaccagcgccggctgggacggcctgctggcccccatcctgaacagcaagccccccgactgcgaccccaacaaggtgaaccccggcagcagcgtgaagggcgactgcggcaaccccagcgtgggcatcttcttcttcgtgagctacatcatcatcagcttcctggtggtggtgaacatgtacatcgccgtgatcctggagaacttcagcgtggccaccgaggagagcgccgagcccctgagcgaggacgacttcgagatgttctacgaggtgtgggagaagttcgaccccgacgccacccagttcatggagttcgagaagctgagccagttcgccgccgccctggagccccccctgaacctgccccagcccaacaagctgcagctgatcgccatggacctgcccatggtgagcggcgacagaatccactgcctggacatcctgttcgccttcaccaagagagtgctgggcgagagcggcgagatggacgccctgagaatccagatggaggagagattcatggccagcaaccccagcaaggtgagctaccagcccatcaccaccaccctgaagagaaagcaggaggaggtgagcgccgtgatcatccagagagcctacagaagacacctgctgaagagaaccgtgaagcaggccagcttcacctacaacaagaacaagatcaagggcggcgccaacctgctgatcaaggaggacatgatcatcgacagaatcaacgagaacagcatcaccgagaagaccgacctgaccatgagcaccgccgcctgcccccccagctacgacagagtgaccaagcccatcgtggagaagcacgagcaggagggcaaggacgagaaggccaagggcaagggaagcggagctactaacttcagcctgctgaagcaggctggagacgtggaggagaaccctggacctatggggaggctgctggccttagtggtcggcgcggcactggtgtcctcagcctgcgggggctgcgtggaggtggactcggagaccgaggccgtgtatgggatgaccttcaaaattctttgcatctcctgcaagcgccgcagcgagaccaacgctgagaccttcaccgagtggaccttccgccagaagggcactgaggagtttgtcaagatcctgcgctatgagaatgaggtgttgcagctggaggaggatgagcgcttcgagggccgcgtggtgtggaatggcagccggggcaccaaagacctgcaggatctgtctatcttcatcaccaatgtcacctacaaccactcgggcgactacgagtgccacgtctaccgcctgctcttcttcgaaaactacgagcacaacaccagcgtcgtcaagaagatccacattgaggtagtggacaaagccaacagagacatggcatccatcgtgtctgagatcatgatgtatgtgctcattgtggtgttgaccatatggctcgtggcagagatgatttactgctacaagaagatcgctgccgccacggagactgctgcacaggagaatgcctcggaatacctggccatcacctctgaaagcaaagagaactgcacgggcgtccaggtggccgaaggaagcggagctactaacttcagcctgctgaagcaggctggagacgtggaggagaaccctggacctatgcacagagatgcctggctacctcgccctgccttcagcctcacggggctcagtctctttttctctttggtgccaccaggacggagcatggaggtcacagtacctgccaccctcaacgtcctcaatggctctgacgcccgcctgccctgcaccttcaactcctgctacacagtgaaccacaaacagttctccctgaactggacttaccaggagtgcaacaactgctctgaggagatgttcctccagttccgcatgaagatcattaacctgaagctggagcggtttcaagaccgcgtggagttctcagggaaccccagcaagtacgatgtgtcggtgatgctgagaaacgtgcagccggaggatgaggggatttacaactgctacatcatgaacccccctgaccgccaccgtggccatggcaagatccatctgcaggtcctcatggaagagccccctgagcgggactccacggtggccgtgattgtgggtgcctccgtcgggggcttcctggctgtggtcatcttggtgctgatggtggtcaagtgtgtgaggagaaaaaaagagcagaagctgagcacagatgacctgaagaccgaggaggagggcaagacggacggtgaaggcaacccggatgatggcgccaag

SEQ ID NO: 60 - DNA, 8172 bp, Artificial Sequence
  Polynucleotide encoding hNav1.1+P2A+hNavBeta1+P2A+hNavBeta2+P2A+hNavBeta3
atggagcagaccgtgctggtgccccccggccccgacagcttcaacttcttcaccagagagagcctggccgccatcgagagaagaatcgccgaggagaaggccaagaaccccaagcccgacaagaaggacgacgacgagaacggccccaagcccaacagcgacctggaggccggcaagaacctgcccttcatctacggcgacatcccccccgagatggtgagcgagcccctggaggacctggacccctactacatcaacaagaagaccttcatcgtgctgaacaagggcaaggccatcttcagattcagcgccaccagcgccctgtacatcctgacccccttcaaccccctgagaaagatcgccatcaagatcctggtgcacagcctgttcagcatgctgatcatgtgcaccatcctgaccaactgcgtgttcatgaccatgagcaacccccccgactggaccaagaacgtggagtacaccttcaccggcatctacaccttcgagagcctgatcaagatcatcgccagaggcttctgcctggaggacttcaccttcctgagagacccctggaactggctggacttcaccgtgatcaccttcgcctacgtgaccgagttcgtggacctgggcaacgtgagcgccctgagaaccttcagagtgctgagagccctgaagaccatcagcgtgatccccggcctgaagaccatcgtgggcgccctgatccagagcgtgaagaagctgagcgacgtgatgatcctgaccgtgttctgcctgagcgtgttcgccctgatcggcctgcagctgttcatgggcaacctgagaaacaagtgcatccagtggccccccaccaacgccagcctggaggagcacagcatcgagaagaacatcaccgtgaactacaacggcaccctgatcaacgagaccgtgttcgagttcgactggaagagctacatccaggacagcagataccactacttcctggagggcttcctggacgccctgctgtgcggcaacagcagcgacgccggccagtgccccgagggctacatgtgcgtgaaggccggcagaaaccccaactacggctacaccagcttcgacaccttcagctgggccttcctgagcctgttcagactgatgacccaggacttctgggagaacctgtaccagctgaccctgagagccgccggcaagacctacatgatcttcttcgtgctggtgatcttcctgggcagcttctacctgatcaacctgatcctggccgtggtggccatggcctacgaggagcagaaccaggccaccctggaggaggccgagcagaaggaggccgagttccagcagatgatcgagcagctgaagaagcagcaggaggccgcccagcaggccgccaccgccaccgccagcgagcacagcagagagcccagcgccgccggcagactgagcgacagcagcagcgaggccagcaagctgagcagcaagagcgccaaggagagaagaaacagaagaaagaagagaaagcagaaggagcagagcggcggcgaggagaaggacgaggacgagttccagaagagcgagagcgaggacagcatcagaagaaagggcttcagattcagcatcgagggcaacagactgacctacgagaagagatacagcagcccccaccagagcctgctgagcatcagaggcagcctgttcagccccagaagaaacagcagaaccagcctgttcagcttcagaggcagagccaaggacgtgggcagcgagaacgacttcgccgacgacgagcacagcaccttcgaggacaacgagagcagaagagacagcctgttcgtgcccagaagacacggcgagagaagaaacagcaacctgagccagaccagcagaagcagcagaatgctggccgtgttccccgccaacggcaagatgcacagcaccgtggactgcaacggcgtggtgagcctggtgggcggccccagcgtgcccaccagccccgtgggccagctgctgcccgaggtgatcatcgacaagcccgccaccgacgacaacggcaccaccaccgagaccgagatgagaaagagaagaagcagcagcttccacgtgagcatggacttcctggaggaccccagccagagacagagagccatgagcatcgccagcatcctgaccaacaccgtggaggagctggaggagagcagacagaagtgccccccctgctggtacaagttcagcaacatcttcctgatctgggactgcagcccctactggctgaaggtgaagcacgtggtgaacctggtggtgatggaccccttcgtggacctggccatcaccatctgcatcgtgctgaacaccctgttcatggccatggagcactaccccatgaccgaccacttcaacaacgtgctgaccgtgggcaacctggtgttcaccggcatcttcaccgccgagatgttcctgaagatcatcgccatggacccctactactacttccaggagggctggaacatcttcgacggcttcatcgtgaccctgagcctggtggagctgggcctggccaacgtggagggcctgagcgtgctgagaagcttcagactgctgagagtgttcaagctggccaagagctggcccaccctgaacatgctgatcaagatcatcggcaacagcgtgggcgccctgggcaacctgaccctggtgctggccatcatcgtgttcatcttcgccgtggtgggcatgcagctgttcggcaagagctacaaggactgcgtgtgcaagatcgccagcgactgccagctgcccagatggcacatgaacgacttcttccacagcttcctgatcgtgttcagagtgctgtgcggcgagtggatcgagaccatgtgggactgcatggaggtggccggccaggccatgtgcctgaccgtgttcatgatggtgatggtgatcggcaacctggtggtgctgaacctgttcctggccctgctgctgagcagcttcagcgccgacaacctggccgccaccgacgacgacaacgagatgaacaacctgcagatcgccgtggacagaatgcacaagggcgtggcctacgtgaagagaaagatctacgagttcatccagcagagcttcatcagaaagcagaagatcctggacgagatcaagcccctggacgacctgaacaacaagaaggacagctgcatgagcaaccacaccgccgagatcggcaaggacctggactacctgaaggacgtgaacggcaccaccagcggcatcggcaccggcagcagcgtggagaagtacatcatcgacgagagcgactacatgagcttcatcaacaaccccagcctgaccgtgaccgtgcccatcgccgtgggcgagagcgacttcgagaacctgaacaccgaggacttcagcagcgagagcgacctggaggagagcaaggagaagctgaacgagagcagcagcagcagcgagggcagcaccgtggacatcggcgcccccgtggaggagcagcccgtggtggagcccgaggagaccctggagcccgaggcctgcttcaccgagggctgcgtgcagagattcaagtgctgccagatcaacgtggaggagggcagaggcaagcagtggtggaacctgagaagaacctgcttcagaatcgtggagcacaactggttcgagaccttcatcgtgttcatgatcctgctgagcagcggcgccctggccttcgaggacatctacatcgaccagagaaagaccatcaagaccatgctggagtacgccgacaaggtgttcacctacatcttcatcctggagatgctgctgaagtgggtggcctacggctaccagacctacttcaccaacgcctggtgctggctggacttcctgatcgtggacgtgagcctggtgagcctgaccgccaacgccctgggctacagcgagctgggcgccatcaagagcctgagaaccctgagagccctgagacccctgagagccctgagcagattcgagggcatgagagtggtggtgaacgccctgctgggcgccatccccagcatcatgaacgtgctgctggtgtgcctgatcttctggctgatcttcagcatcatgggcgtgaacctgttcgccggcaagttctaccactgcatcaacaccaccaccggcgacagattcgacatcgaggacgtgaacaaccacaccgactgcctgaagctgatcgagagaaacgagaccgccagatggaagaacgtgaaggtgaacttcgacaacgtgggcttcggctacctgagcctgctgcaggtggccaccttcaagggctggatggacatcatgtacgccgccgtggacagcagaaacgtggagctgcagcccaagtacgaggagagcctgtacatgtacctgtacttcgtgatcttcatcatcttcggcagcttcttcaccctgaacctgttcatcggcgtgatcatcgacaacttcaaccagcagaagaagaagttcggcggccaggacatcttcatgaccgaggagcagaagaagtactacaacgccatgaagaagctgggcagcaagaagccccagaagcccatccccagacccggcaacaagttccagggcatggtgttcgacttcgtgaccagacaggtgttcgacatcagcatcatgatcctgatctgcctgaacatggtgaccatgatggtggagaccgacgaccagagcgagtacgtgaccaccatcctgagcagaatcaacctggtgttcatcgtgctgttcaccggcgagtgcgtgctgaagctgatcagcctgagacactactacttcaccatcggctggaacatcttcgacttcgtggtggtgatcctgagcatcgtgggcatgttcctggccgagctgatcgagaagtacttcgtgagccccaccctgttcagagtgatcagactggccagaatcggcagaatcctgagactgatcaagggcgccaagggcatcagaaccctgctgttcgccctgatgatgagcctgcccgccctgttcaacatcggcctgctgctgttcctggtgatgttcatctacgccatcttcggcatgagcaacttcgcctacgtgaagagagaggtgggcatcgacgacatgttcaacttcgagaccttcggcaacagcatgatctgcctgttccagatcaccaccagcgccggctgggacggcctgctggcccccatcctgaacagcaagccccccgactgcgaccccaacaaggtgaaccccggcagcagcgtgaagggcgactgcggcaaccccagcgtgggcatcttcttcttcgtgagctacatcatcatcagcttcctggtggtggtgaacatgtacatcgccgtgatcctggagaacttcagcgtggccaccgaggagagcgccgagcccctgagcgaggacgacttcgagatgttctacgaggtgtgggagaagttcgaccccgacgccacccagttcatggagttcgagaagctgagccagttcgccgccgccctggagccccccctgaacctgccccagcccaacaagctgcagctgatcgccatggacctgcccatggtgagcggcgacagaatccactgcctggacatcctgttcgccttcaccaagagagtgctgggcgagagcggcgagatggacgccctgagaatccagatggaggagagattcatggccagcaaccccagcaaggtgagctaccagcccatcaccaccaccctgaagagaaagcaggaggaggtgagcgccgtgatcatccagagagcctacagaagacacctgctgaagagaaccgtgaagcaggccagcttcacctacaacaagaacaagatcaagggcggcgccaacctgctgatcaaggaggacatgatcatcgacagaatcaacgagaacagcatcaccgagaagaccgacctgaccatgagcaccgccgcctgcccccccagctacgacagagtgaccaagcccatcgtggagaagcacgagcaggagggcaaggacgagaaggccaagggcaagggaagcggagctactaacttcagcctgctgaagcaggctggagacgtggaggagaaccctggacctatggggaggctgctggccttagtggtcggcgcggcactggtgtcctcagcctgcgggggctgcgtggaggtggactcggagaccgaggccgtgtatgggatgaccttcaaaattctttgcatctcctgcaagcgccgcagcgagaccaacgctgagaccttcaccgagtggaccttccgccagaagggcactgaggagtttgtcaagatcctgcgctatgagaatgaggtgttgcagctggaggaggatgagcgcttcgagggccgcgtggtgtggaatggcagccggggcaccaaagacctgcaggatctgtctatcttcatcaccaatgtcacctacaaccactcgggcgactacgagtgccacgtctaccgcctgctcttcttcgaaaactacgagcacaacaccagcgtcgtcaagaagatccacattgaggtagtggacaaagccaacagagacatggcatccatcgtgtctgagatcatgatgtatgtgctcattgtggtgttgaccatatggctcgtggcagagatgatttactgctacaagaagatcgctgccgccacggagactgctgcacaggagaatgcctcggaatacctggccatcacctctgaaagcaaagagaactgcacgggcgtccaggtggccgaaggaagcggagctactaacttcagcctgctgaagcaggctggagacgtggaggagaaccctggacctatgcacagagatgcctggctacctcgccctgccttcagcctcacggggctcagtctctttttctctttggtgccaccaggacggagcatggaggtcacagtacctgccaccctcaacgtcctcaatggctctgacgcccgcctgccctgcaccttcaactcctgctacacagtgaaccacaaacagttctccctgaactggacttaccaggagtgcaacaactgctctgaggagatgttcctccagttccgcatgaagatcattaacctgaagctggagcggtttcaagaccgcgtggagttctcagggaaccccagcaagtacgatgtgtcggtgatgctgagaaacgtgcagccggaggatgaggggatttacaactgctacatcatgaacccccctgaccgccaccgtggccatggcaagatccatctgcaggtcctcatggaagagccccctgagcgggactccacggtggccgtgattgtgggtgcctccgtcgggggcttcctggctgtggtcatcttggtgctgatggtggtcaagtgtgtgaggagaaaaaaagagcagaagctgagcacagatgacctgaagaccgaggaggagggcaagacggacggtgaaggcaacccggatgatggcgccaagggaagcggagctactaacttcagcctgctgaagcaggctggagacgtggaggagaaccctggacctatgcctgccttcaatagattgtttcccctggcttctctcgtgcttatctactgggtcagtgtctgcttccctgtgtgtgtggaagtgccctcggagacggaggccgtgcagggcaaccccatgaagctgcgctgcatctcctgcatgaagagagaggaggtggaggccaccacggtggtggaatggttctacaggcccgagggcggtaaagatttccttatttacgagtatcggaatggccaccaggaggtggagagcccctttcaggggcgcctgcagtggaatggcagcaaggacctgcaggacgtgtccatcactgtgctcaacgtcactctgaacgactctggcctctacacctgcaatgtgtcccgggagtttgagtttgaggcgcatcggccctttgtgaagacgacgcggctgatccccctaagagtcaccgaggaggctggagaggacttcacctctgtggtctcagaaatcatgatgtacatccttctggtcttcctcaccttgtggctgctcatcgagatgatatattgctacagaaaggtctcaaaagccgaagaggcagcccaagaaaacgcgtctgactaccttgccatcccatctgagaacaaggagaactctgcggtaccagtggaggaatag

SEQ ID NO: 61 - DNA, 6735 bp, Artificial Sequence
  Polynucleotide encoding hNav1.2+P2A+hNavBeta1
atggcacagtcagtgctggtaccgccaggacctgacagcttccgcttctttaccagggaatcccttgctgctattgaacaacgcattgcagaagagaaagctaagagacccaaacaggaacgcaaggatgaggatgatgaaaatggcccaaagccaaacagtgacttggaagcaggaaaatctcttccatttatttatggagacattcctccagagatggtgtcagtgcccctggaggatctggacccctactatatcaataagaaaacgtttatagtattgaataaagggaaagcaatctctcgattcagtgccacccctgccctttacattttaactcccttcaaccctattagaaaattagctattaagattttggtacattctttattcaatatgctcattatgtgcacgattcttaccaactgtgtatttatgaccatgagtaaccctccagactggacaaagaatgtggagtatacctttacaggaatttatacttttgaatcacttattaaaatacttgcaaggggcttttgtttagaagatttcacatttttacgggatccatggaattggttggatttcacagtcattacttttgcatatgtgacagagtttgtggacctgggcaatgtctcagcgttgagaacattcagagttctccgagcattgaaaacaatttcagtcattccaggcctgaagaccattgtgggggccctgatccagtcagtgaagaagctttctgatgtcatgatcttgactgtgttctgtctaagcgtgtttgcgctaataggattgcagttgttcatgggcaacctacgaaataaatgtttgcaatggcctccagataattcttcctttgaaataaatatcacttccttctttaacaattcattggatgggaatggtactactttcaataggacagtgagcatatttaactgggatgaatatattgaggataaaagtcacttttattttttagaggggcaaaatgatgctctgctttgtggcaacagctcagatgcaggccagtgtcctgaaggatacatctgtgtgaaggctggtagaaaccccaactatggctacacgagctttgacacctttagttgggcctttttgtccttatttcgtctcatgactcaagacttctgggaaaacctttatcaactgacactacgtgctgctgggaaaacgtacatgatattttttgtgctggtcattttcttgggctcattctatctaataaatttgatcttggctgtggtggccatggcctatgaggaacagaatcaggccacattggaagaggctgaacagaaggaagctgaatttcagcagatgctcgaacagttgaaaaagcaacaagaagaagctcaggcggcagctgcagccgcatctgctgaatcaagagacttcagtggtgctggtgggataggagttttttcagagagttcttcagtagcatctaagttgagctccaaaagtgaaaaagagctgaaaaacagaagaaagaaaaagaaacagaaagaacagtctggagaagaagagaaaaatgacagagtccgaaaatcggaatctgaagacagcataagaagaaaaggtttccgtttttccttggaaggaagtaggctgacatatgaaaagagattttcttctccacaccagtccttactgagcatccgtggctcccttttctctccaagacgcaacagtagggcgagccttttcagcttcagaggtcgagcaaaggacattggctctgagaatgactttgctgatgatgagcacagcacctttgaggacaatgacagccgaagagactctctgttcgtgccgcacagacatggagaacggcgccacagcaatgtcagccaggccagccgtgcctccagggtgctccccatcctgcccatgaatgggaagatgcatagcgctgtggactgcaatggtgtggtctccctggtcgggggcccttctaccctcacatctgctgggcagctcctaccagagggcacaactactgaaacagaaataagaaagagacggtccagttcttatcatgtttccatggatttattggaagatcctacatcaaggcaaagagcaatgagtatagccagtattttgaccaacaccatggaagaacttgaagaatccagacagaaatgcccaccatgctggtataaatttgctaatatgtgtttgatttgggactgttgtaaaccatggttaaaggtgaaacaccttgtcaacctggttgtaatggacccatttgttgacctggccatcaccatctgcattgtcttaaatacactcttcatggctatggagcactatcccatgacggagcagttcagcagtgtactgtctgttggaaacctggtcttcacagggatcttcacagcagaaatgtttctcaagataattgccatggatccatattattactttcaagaaggctggaatatttttgatggttttattgtgagccttagtttaatggaacttggtttggcaaatgtggaaggattgtcagttctccgatcattccggctgctccgagttttcaagttggcaaaatcttggccaactctaaatatgctaattaagatcattggcaattctgtgggggctctaggaaacctcaccttggtattggccatcatcgtcttcatttttgctgtggtcggcatgcagctctttggtaagagctacaaagaatgtgtctgcaagatttccaatgattgtgaactcccacgctggcacatgcatgactttttccactccttcctgatcgtgttccgcgtgctgtgtggagagtggatagagaccatgtgggactgtatggaggtcgctggccaaaccatgtgccttactgtcttcatgatggtcatggtgattggaaatctagtggttctgaacctcttcttggccttgcttttgagttccttcagttctgacaatcttgctgccactgatgatgataacgaaatgaataatctccagattgctgtgggaaggatgcagaaaggaatcgattttgttaaaagaaaaatacgtgaatttattcagaaagcctttgttaggaagcagaaagctttagatgaaattaaaccgcttgaagatctaaataataaaaaagacagctgtatttccaaccataccaccatagaaataggcaaagacctcaattatctcaaagacggaaatggaactactagtggcataggcagcagtgtagaaaaatatgtcgtggatgaaagtgattacatgtcatttataaacaaccctagcctcactgtgacagtaccaattgctgttggagaatctgactttgaaaatttaaatactgaagaattcagcagcgagtcagatatggaggaaagcaaagagaagctaaatgcaactagttcatctgaaggcagcacggttgatattggagctcccgccgagggagaacagcctgaggttgaacctgaggaatcccttgaacctgaagcctgttttacagaagactgtgtacggaagttcaagtgttgtcagataagcatagaagaaggcaaagggaaactctggtggaatttgaggaaaacatgctataagatagtggagcacaattggttcgaaaccttcattgtcttcatgattctgctgagcagtggggctctggcctttgaagatatatacattgagcagcgaaaaaccattaagaccatgttagaatatgctgacaaggttttcacttacatattcattctggaaatgctgctaaagtgggttgcatatggttttcaagtgtattttaccaatgcctggtgctggctagacttcctgattgttgatgtctcactggttagcttaactgcaaatgccttgggttactcagaacttggtgccatcaaatccctcagaacactaagagctctgaggccactgagagctttgtcccggtttgaaggaatgagggttgttgtaaatgctcttttaggagccattccatctatcatgaatgtacttctggtttgtctgatcttttggctaatattcagtatcatgggagtgaatctctttgctggcaagttttaccattgtattaattacaccactggagagatgtttgatgtaagcgtggtcaacaactacagtgagtgcaaagctctcattgagagcaatcaaactgccaggtggaaaaatgtgaaagtaaactttgataacgtaggacttggatatctgtctctacttcaagtagccacgtttaagggatggatggatattatgtatgcagctgttgattcacgaaatgtagaattacaacccaagtatgaagacaacctgtacatgtatctttattttgtcatctttattatttttggttcattctttaccttgaatcttttcattggtgtcatcatagataacttcaaccaacagaaaaagaagtttggaggtcaagacatttttatgacagaagaacagaagaaatactacaatgcaatgaaaaaactgggttcaaagaaaccacaaaaacccatacctcgacctgctaacaaattccaaggaatggtctttgattttgtaaccaaacaagtctttgatatcagcatcatgatcctcatctgccttaacatggtcaccatgatggtggaaaccgatgaccagagtcaagaaatgacaaacattctgtactggattaatctggtgtttattgttctgttcactggagaatgtgtgctgaaactgatctctcttcgttactactatttcactattggatggaatatttttgattttgtggtggtcattctctccattgtaggaatgtttctggctgaactgatagaaaagtattttgtgtcccctaccctgttccgagtgatccgtcttgccaggattggccgaatcctacgtctgatcaaaggagcaaaggggatccgcacgctgctctttgctttgatgatgtcccttcctgcgttgtttaacatcggcctccttcttttcctggtcatgttcatctacgccatctttgggatgtccaattttgcctatgttaagagggaagttgggatcgatgacatgttcaactttgagacctttggcaacagcatgatctgcctgttccaaattacaacctctgctggctgggatggattgctagcacctattcttaatagtggacctccagactgtgaccctgacaaagatcaccctggaagctcagttaaaggagactgtgggaacccatctgttgggattttcttttttgtcagttacatcatcatatccttcctggttgtggtgaacatgtacatcgcggtcatcctggagaacttcagtgttgctactgaagaaagtgcagagcctctgagtgaggatgactttgagatgttctatgaggtttgggagaagtttgatcccgatgcgacccagtttatagagtttgccaaactttctgattttgcagatgccctggatcctcctcttctcatagcaaaacccaacaaagtccagctcattgccatggatctgcccatggtgagtggtgaccggatccactgtcttgacatcttatttgcttttacaaagcgtgttttgggtgagagtggagagatggatgcccttcgaatacagatggaagagcgattcatggcatcaaacccctccaaagtctcttatgagcccattacgaccacgttgaaacgcaaacaagaggaggtgtctgctattattatccagagggcttacagacgctacctcttgaagcaaaaagttaaaaaggtatcaagtatatacaagaaagacaaaggcaaagaatgtgatggaacacccatcaaagaagatactctcattgataaactgaatgagaattcaactccagagaaaaccgatatgacgccttccaccacgtctccaccctcgtatgatagtgtgaccaaaccagaaaaagaaaaatttgaaaaagacaaatcagaaaaggaagacaaagggaaagatatcagggaaagtaaaaagggaagcggagctactaacttcagcctgctgaagcaggctggagacgtggaggagaaccctggacctatggggaggctgctggccttagtggtcggcgcggcactggtgtcctcagcctgcgggggctgcgtggaggtggactcggagaccgaggccgtgtatgggatgaccttcaaaattctttgcatctcctgcaagcgccgcagcgagaccaacgctgagaccttcaccgagtggaccttccgccagaagggcactgaggagtttgtcaagatcctgcgctatgagaatgaggtgttgcagctggaggaggatgagcgcttcgagggccgcgtggtgtggaatggcagccggggcaccaaagacctgcaggatctgtctatcttcatcaccaatgtcacctacaaccactcgggcgactacgagtgccacgtctaccgcctgctcttcttcgaaaactacgagcacaacaccagcgtcgtcaagaagatccacattgaggtagtggacaaagccaacagagacatggcatccatcgtgtctgagatcatgatgtatgtgctcattgtggtgttgaccatatggctcgtggcagagatgatttactgctacaagaagatcgctgccgccacggagactgctgcacaggagaatgcctcggaatacctggccatcacctctgaaagcaaagagaactgcacgggcgtccaggtggccgaa

SEQ ID NO: 62 - DNA, 7446 bp, Artificial Sequence
  Polynucleotide encoding hNav1.2+P2A+hNavBeta1+P2A+hNavBeta2
atggcacagtcagtgctggtaccgccaggacctgacagcttccgcttctttaccagggaatcccttgctgctattgaacaacgcattgcagaagagaaagctaagagacccaaacaggaacgcaaggatgaggatgatgaaaatggcccaaagccaaacagtgacttggaagcaggaaaatctcttccatttatttatggagacattcctccagagatggtgtcagtgcccctggaggatctggacccctactatatcaataagaaaacgtttatagtattgaataaagggaaagcaatctctcgattcagtgccacccctgccctttacattttaactcccttcaaccctattagaaaattagctattaagattttggtacattctttattcaatatgctcattatgtgcacgattcttaccaactgtgtatttatgaccatgagtaaccctccagactggacaaagaatgtggagtatacctttacaggaatttatacttttgaatcacttattaaaatacttgcaaggggcttttgtttagaagatttcacatttttacgggatccatggaattggttggatttcacagtcattacttttgcatatgtgacagagtttgtggacctgggcaatgtctcagcgttgagaacattcagagttctccgagcattgaaaacaatttcagtcattccaggcctgaagaccattgtgggggccctgatccagtcagtgaagaagctttctgatgtcatgatcttgactgtgttctgtctaagcgtgtttgcgctaataggattgcagttgttcatgggcaacctacgaaataaatgtttgcaatggcctccagataattcttcctttgaaataaatatcacttccttctttaacaattcattggatgggaatggtactactttcaataggacagtgagcatatttaactgggatgaatatattgaggataaaagtcacttttattttttagaggggcaaaatgatgctctgctttgtggcaacagctcagatgcaggccagtgtcctgaaggatacatctgtgtgaaggctggtagaaaccccaactatggctacacgagctttgacacctttagttgggcctttttgtccttatttcgtctcatgactcaagacttctgggaaaacctttatcaactgacactacgtgctgctgggaaaacgtacatgatattttttgtgctggtcattttcttgggctcattctatctaataaatttgatcttggctgtggtggccatggcctatgaggaacagaatcaggccacattggaagaggctgaacagaaggaagctgaatttcagcagatgctcgaacagttgaaaaagcaacaagaagaagctcaggcggcagctgcagccgcatctgctgaatcaagagacttcagtggtgctggtgggataggagttttttcagagagttcttcagtagcatctaagttgagctccaaaagtgaaaaagagctgaaaaacagaagaaagaaaaagaaacagaaagaacagtctggagaagaagagaaaaatgacagagtccgaaaatcggaatctgaagacagcataagaagaaaaggtttccgtttttccttggaaggaagtaggctgacatatgaaaagagattttcttctccacaccagtccttactgagcatccgtggctcccttttctctccaagacgcaacagtagggcgagccttttcagcttcagaggtcgagcaaaggacattggctctgagaatgactttgctgatgatgagcacagcacctttgaggacaatgacagccgaagagactctctgttcgtgccgcacagacatggagaacggcgccacagcaatgtcagccaggccagccgtgcctccagggtgctccccatcctgcccatgaatgggaagatgcatagcgctgtggactgcaatggtgtggtctccctggtcgggggcccttctaccctcacatctgctgggcagctcctaccagagggcacaactactgaaacagaaataagaaagagacggtccagttcttatcatgtttccatggatttattggaagatcctacatcaaggcaaagagcaatgagtatagccagtattttgaccaacaccatggaagaacttgaagaatccagacagaaatgcccaccatgctggtataaatttgctaatatgtgtttgatttgggactgttgtaaaccatggttaaaggtgaaacaccttgtcaacctggttgtaatggacccatttgttgacctggccatcaccatctgcattgtcttaaatacactcttcatggctatggagcactatcccatgacggagcagttcagcagtgtactgtctgttggaaacctggtcttcacagggatcttcacagcagaaatgtttctcaagataattgccatggatccatattattactttcaagaaggctggaatatttttgatggttttattgtgagccttagtttaatggaacttggtttggcaaatgtggaaggattgtcagttctccgatcattccggctgctccgagttttcaagttggcaaaatcttggccaactctaaatatgctaattaagatcattggcaattctgtgggggctctaggaaacctcaccttggtattggccatcatcgtcttcatttttgctgtggtcggcatgcagctctttggtaagagctacaaagaatgtgtctgcaagatttccaatgattgtgaactcccacgctggcacatgcatgactttttccactccttcctgatcgtgttccgcgtgctgtgtggagagtggatagagaccatgtgggactgtatggaggtcgctggccaaaccatgtgccttactgtcttcatgatggtcatggtgattggaaatctagtggttctgaacctcttcttggccttgcttttgagttccttcagttctgacaatcttgctgccactgatgatgataacgaaatgaataatctccagattgctgtgggaaggatgcagaaaggaatcgattttgttaaaagaaaaatacgtgaatttattcagaaagcctttgttaggaagcagaaagctttagatgaaattaaaccgcttgaagatctaaataataaaaaagacagctgtatttccaaccataccaccatagaaataggcaaagacctcaattatctcaaagacggaaatggaactactagtggcataggcagcagtgtagaaaaatatgtcgtggatgaaagtgattacatgtcatttataaacaaccctagcctcactgtgacagtaccaattgctgttggagaatctgactttgaaaatttaaatactgaagaattcagcagcgagtcagatatggaggaaagcaaagagaagctaaatgcaactagttcatctgaaggcagcacggttgatattggagctcccgccgagggagaacagcctgaggttgaacctgaggaatcccttgaacctgaagcctgttttacagaagactgtgtacggaagttcaagtgttgtcagataagcatagaagaaggcaaagggaaactctggtggaatttgaggaaaacatgctataagatagtggagcacaattggttcgaaaccttcattgtcttcatgattctgctgagcagtggggctctggcctttgaagatatatacattgagcagcgaaaaaccattaagaccatgttagaatatgctgacaaggttttcacttacatattcattctggaaatgctgctaaagtgggttgcatatggttttcaagtgtattttaccaatgcctggtgctggctagacttcctgattgttgatgtctcactggttagcttaactgcaaatgccttgggttactcagaacttggtgccatcaaatccctcagaacactaagagctctgaggccactgagagctttgtcccggtttgaaggaatgagggttgttgtaaatgctcttttaggagccattccatctatcatgaatgtacttctggtttgtctgatcttttggctaatattcagtatcatgggagtgaatctctttgctggcaagttttaccattgtattaattacaccactggagagatgtttgatgtaagcgtggtcaacaactacagtgagtgcaaagctctcattgagagcaatcaaactgccaggtggaaaaatgtgaaagtaaactttgataacgtaggacttggatatctgtctctacttcaagtagccacgtttaagggatggatggatattatgtatgcagctgttgattcacgaaatgtagaattacaacccaagtatgaagacaacctgtacatgtatctttattttgtcatctttattatttttggttcattctttaccttgaatcttttcattggtgtcatcatagataacttcaaccaacagaaaaagaagtttggaggtcaagacatttttatgacagaagaacagaagaaatactacaatgcaatgaaaaaactgggttcaaagaaaccacaaaaacccatacctcgacctgctaacaaattccaaggaatggtctttgattttgtaaccaaacaagtctttgatatcagcatcatgatcctcatctgccttaacatggtcaccatgatggtggaaaccgatgaccagagtcaagaaatgacaaacattctgtactggattaatctggtgtttattgttctgttcactggagaatgtgtgctgaaactgatctctcttcgttactactatttcactattggatggaatatttttgattttgtggtggtcattctctccattgtaggaatgtttctggctgaactgatagaaaagtattttgtgtcccctaccctgttccgagtgatccgtcttgccaggattggccgaatcctacgtctgatcaaaggagcaaaggggatccgcacgctgctctttgctttgatgatgtcccttcctgcgttgtttaacatcggcctccttcttttcctggtcatgttcatctacgccatctttgggatgtccaattttgcctatgttaagagggaagttgggatcgatgacatgttcaactttgagacctttggcaacagcatgatctgcctgttccaaattacaacctctgctggctgggatggattgctagcacctattcttaatagtggacctccagactgtgaccctgacaaagatcaccctggaagctcagttaaaggagactgtgggaacccatctgttgggattttcttttttgtcagttacatcatcatatccttcctggttgtggtgaacatgtacatcgcggtcatcctggagaacttcagtgttgctactgaagaaagtgcagagcctctgagtgaggatgactttgagatgttctatgaggtttgggagaagtttgatcccgatgcgacccagtttatagagtttgccaaactttctgattttgcagatgccctggatcctcctcttctcatagcaaaacccaacaaagtccagctcattgccatggatctgcccatggtgagtggtgaccggatccactgtcttgacatcttatttgcttttacaaagcgtgttttgggtgagagtggagagatggatgcccttcgaatacagatggaagagcgattcatggcatcaaacccctccaaagtctcttatgagcccattacgaccacgttgaaacgcaaacaagaggaggtgtctgctattattatccagagggcttacagacgctacctcttgaagcaaaaagttaaaaaggtatcaagtatatacaagaaagacaaaggcaaagaatgtgatggaacacccatcaaagaagatactctcattgataaactgaatgagaattcaactccagagaaaaccgatatgacgccttccaccacgtctccaccctcgtatgatagtgtgaccaaaccagaaaaagaaaaatttgaaaaagacaaatcagaaaaggaagacaaagggaaagatatcagggaaagtaaaaagggaagcggagctactaacttcagcctgctgaagcaggctggagacgtggaggagaaccctggacctatggggaggctgctggccttagtggtcggcgcggcactggtgtcctcagcctgcgggggctgcgtggaggtggactcggagaccgaggccgtgtatgggatgaccttcaaaattctttgcatctcctgcaagcgccgcagcgagaccaacgctgagaccttcaccgagtggaccttccgccagaagggcactgaggagtttgtcaagatcctgcgctatgagaatgaggtgttgcagctggaggaggatgagcgcttcgagggccgcgtggtgtggaatggcagccggggcaccaaagacctgcaggatctgtctatcttcatcaccaatgtcacctacaaccactcgggcgactacgagtgccacgtctaccgcctgctcttcttcgaaaactacgagcacaacaccagcgtcgtcaagaagatccacattgaggtagtggacaaagccaacagagacatggcatccatcgtgtctgagatcatgatgtatgtgctcattgtggtgttgaccatatggctcgtggcagagatgatttactgctacaagaagatcgctgccgccacggagactgctgcacaggagaatgcctcggaatacctggccatcacctctgaaagcaaagagaactgcacgggcgtccaggtggccgaaggaagcggagctactaacttcagcctgctgaagcaggctggagacgtggaggagaaccctggacctatgcacagagatgcctggctacctcgccctgccttcagcctcacggggctcagtctctttttctctttggtgccaccaggacggagcatggaggtcacagtacctgccaccctcaacgtcctcaatggctctgacgcccgcctgccctgcaccttcaactcctgctacacagtgaaccacaaacagttctccctgaactggacttaccaggagtgcaacaactgctctgaggagatgttcctccagttccgcatgaagatcattaacctgaagctggagcggtttcaagaccgcgtggagttctcagggaaccccagcaagtacgatgtgtcggtgatgctgagaaacgtgcagccggaggatgaggggatttacaactgctacatcatgaacccccctgaccgccaccgtggccatggcaagatccatctgcaggtcctcatggaagagccccctgagcgggactccacggtggccgtgattgtgggtgcctccgtcgggggcttcctggctgtggtcatcttggtgctgatggtggtcaagtgtgtgaggagaaaaaaagagcagaagctgagcacagatgacctgaagaccgaggaggagggcaagacggacggtgaaggcaacccggatgatggcgccaag

SEQ ID NO: 63 - DNA, 8160 bp, Artificial Sequence
  Polynucleotide encoding hNav1.2+P2A+hNavBeta1+P2A+hNavBeta2+P2A+hNavBeta3
atggcacagtcagtgctggtaccgccaggacctgacagcttccgcttctttaccagggaatcccttgctgctattgaacaacgcattgcagaagagaaagctaagagacccaaacaggaacgcaaggatgaggatgatgaaaatggcccaaagccaaacagtgacttggaagcaggaaaatctcttccatttatttatggagacattcctccagagatggtgtcagtgcccctggaggatctggacccctactatatcaataagaaaacgtttatagtattgaataaagggaaagcaatctctcgattcagtgccacccctgccctttacattttaactcccttcaaccctattagaaaattagctattaagattttggtacattctttattcaatatgctcattatgtgcacgattcttaccaactgtgtatttatgaccatgagtaaccctccagactggacaaagaatgtggagtatacctttacaggaatttatacttttgaatcacttattaaaatacttgcaaggggcttttgtttagaagatttcacatttttacgggatccatggaattggttggatttcacagtcattacttttgcatatgtgacagagtttgtggacctgggcaatgtctcagcgttgagaacattcagagttctccgagcattgaaaacaatttcagtcattccaggcctgaagaccattgtgggggccctgatccagtcagtgaagaagctttctgatgtcatgatcttgactgtgttctgtctaagcgtgtttgcgctaataggattgcagttgttcatgggcaacctacgaaataaatgtttgcaatggcctccagataattcttcctttgaaataaatatcacttccttctttaacaattcattggatgggaatggtactactttcaataggacagtgagcatatttaactgggatgaatatattgaggataaaagtcacttttattttttagaggggcaaaatgatgctctgctttgtggcaacagctcagatgcaggccagtgtcctgaaggatacatctgtgtgaaggctggtagaaaccccaactatggctacacgagctttgacacctttagttgggcctttttgtccttatttcgtctcatgactcaagacttctgggaaaacctttatcaactgacactacgtgctgctgggaaaacgtacatgatattttttgtgctggtcattttcttgggctcattctatctaataaatttgatcttggctgtggtggccatggcctatgaggaacagaatcaggccacattggaagaggctgaacagaaggaagctgaatttcagcagatgctcgaacagttgaaaaagcaacaagaagaagctcaggcggcagctgcagccgcatctgctgaatcaagagacttcagtggtgctggtgggataggagttttttcagagagttcttcagtagcatctaagttgagctccaaaagtgaaaaagagctgaaaaacagaagaaagaaaaagaaacagaaagaacagtctggagaagaagagaaaaatgacagagtccgaaaatcggaatctgaagacagcataagaagaaaaggtttccgtttttccttggaaggaagtaggctgacatatgaaaagagattttcttctccacaccagtccttactgagcatccgtggctcccttttctctccaagacgcaacagtagggcgagccttttcagcttcagaggtcgagcaaaggacattggctctgagaatgactttgctgatgatgagcacagcacctttgaggacaatgacagccgaagagactctctgttcgtgccgcacagacatggagaacggcgccacagcaatgtcagccaggccagccgtgcctccagggtgctccccatcctgcccatgaatgggaagatgcatagcgctgtggactgcaatggtgtggtctccctggtcgggggcccttctaccctcacatctgctgggcagctcctaccagagggcacaactactgaaacagaaataagaaagagacggtccagttcttatcatgtttccatggatttattggaagatcctacatcaaggcaaagagcaatgagtatagccagtattttgaccaacaccatggaagaacttgaagaatccagacagaaatgcccaccatgctggtataaatttgctaatatgtgtttgatttgggactgttgtaaaccatggttaaaggtgaaacaccttgtcaacctggttgtaatggacccatttgttgacctggccatcaccatctgcattgtcttaaatacactcttcatggctatggagcactatcccatgacggagcagttcagcagtgtactgtctgttggaaacctggtcttcacagggatcttcacagcagaaatgtttctcaagataattgccatggatccatattattactttcaagaaggctggaatatttttgatggttttattgtgagccttagtttaatggaacttggtttggcaaatgtggaaggattgtcagttctccgatcattccggctgctccgagttttcaagttggcaaaatcttggccaactctaaatatgctaattaagatcattggcaattctgtgggggctctaggaaacctcaccttggtattggccatcatcgtcttcatttttgctgtggtcggcatgcagctctttggtaagagctacaaagaatgtgtctgcaagatttccaatgattgtgaactcccacgctggcacatgcatgactttttccactccttcctgatcgtgttccgcgtgctgtgtggagagtggatagagaccatgtgggactgtatggaggtcgctggccaaaccatgtgccttactgtcttcatgatggtcatggtgattggaaatctagtggttctgaacctcttcttggccttgcttttgagttccttcagttctgacaatcttgctgccactgatgatgataacgaaatgaataatctccagattgctgtgggaaggatgcagaaaggaatcgattttgttaaaagaaaaatacgtgaatttattcagaaagcctttgttaggaagcagaaagctttagatgaaattaaaccgcttgaagatctaaataataaaaaagacagctgtatttccaaccataccaccatagaaataggcaaagacctcaattatctcaaagacggaaatggaactactagtggcataggcagcagtgtagaaaaatatgtcgtggatgaaagtgattacatgtcatttataaacaaccctagcctcactgtgacagtaccaattgctgttggagaatctgactttgaaaatttaaatactgaagaattcagcagcgagtcagatatggaggaaagcaaagagaagctaaatgcaactagttcatctgaaggcagcacggttgatattggagctcccgccgagggagaacagcctgaggttgaacctgaggaatcccttgaacctgaagcctgttttacagaagactgtgtacggaagttcaagtgttgtcagataagcatagaagaaggcaaagggaaactctggtggaatttgaggaaaacatgctataagatagtggagcacaattggttcgaaaccttcattgtcttcatgattctgctgagcagtggggctctggcctttgaagatatatacattgagcagcgaaaaaccattaagaccatgttagaatatgctgacaaggttttcacttacatattcattctggaaatgctgctaaagtgggttgcatatggttttcaagtgtattttaccaatgcctggtgctggctagacttcctgattgttgatgtctcactggttagcttaactgcaaatgccttgggttactcagaacttggtgccatcaaatccctcagaacactaagagctctgaggccactgagagctttgtcccggtttgaaggaatgagggttgttgtaaatgctcttttaggagccattccatctatcatgaatgtacttctggtttgtctgatcttttggctaatattcagtatcatgggagtgaatctctttgctggcaagttttaccattgtattaattacaccactggagagatgtttgatgtaagcgtggtcaacaactacagtgagtgcaaagctctcattgagagcaatcaaactgccaggtggaaaaatgtgaaagtaaactttgataacgtaggacttggatatctgtctctacttcaagtagccacgtttaagggatggatggatattatgtatgcagctgttgattcacgaaatgtagaattacaacccaagtatgaagacaacctgtacatgtatctttattttgtcatctttattatttttggttcattctttaccttgaatcttttcattggtgtcatcatagataacttcaaccaacagaaaaagaagtttggaggtcaagacatttttatgacagaagaacagaagaaatactacaatgcaatgaaaaaactgggttcaaagaaaccacaaaaacccatacctcgacctgctaacaaattccaaggaatggtctttgattttgtaaccaaacaagtctttgatatcagcatcatgatcctcatctgccttaacatggtcaccatgatggtggaaaccgatgaccagagtcaagaaatgacaaacattctgtactggattaatctggtgtttattgttctgttcactggagaatgtgtgctgaaactgatctctcttcgttactactatttcactattggatggaatatttttgattttgtggtggtcattctctccattgtaggaatgtttctggctgaactgatagaaaagtattttgtgtcccctaccctgttccgagtgatccgtcttgccaggattggccgaatcctacgtctgatcaaaggagcaaaggggatccgcacgctgctctttgctttgatgatgtcccttcctgcgttgtttaacatcggcctccttcttttcctggtcatgttcatctacgccatctttgggatgtccaattttgcctatgttaagagggaagttgggatcgatgacatgttcaactttgagacctttggcaacagcatgatctgcctgttccaaattacaacctctgctggctgggatggattgctagcacctattcttaatagtggacctccagactgtgaccctgacaaagatcaccctggaagctcagttaaaggagactgtgggaacccatctgttgggattttcttttttgtcagttacatcatcatatccttcctggttgtggtgaacatgtacatcgcggtcatcctggagaacttcagtgttgctactgaagaaagtgcagagcctctgagtgaggatgactttgagatgttctatgaggtttgggagaagtttgatcccgatgcgacccagtttatagagtttgccaaactttctgattttgcagatgccctggatcctcctcttctcatagcaaaacccaacaaagtccagctcattgccatggatctgcccatggtgagtggtgaccggatccactgtcttgacatcttatttgcttttacaaagcgtgttttgggtgagagtggagagatggatgcccttcgaatacagatggaagagcgattcatggcatcaaacccctccaaagtctcttatgagcccattacgaccacgttgaaacgcaaacaagaggaggtgtctgctattattatccagagggcttacagacgctacctcttgaagcaaaaagttaaaaaggtatcaagtatatacaagaaagacaaaggcaaagaatgtgatggaacacccatcaaagaagatactctcattgataaactgaatgagaattcaactccagagaaaaccgatatgacgccttccaccacgtctccaccctcgtatgatagtgtgaccaaaccagaaaaagaaaaatttgaaaaagacaaatcagaaaaggaagacaaagggaaagatatcagggaaagtaaaaagggaagcggagctactaacttcagcctgctgaagcaggctggagacgtggaggagaaccctggacctatggggaggctgctggccttagtggtcggcgcggcactggtgtcctcagcctgcgggggctgcgtggaggtggactcggagaccgaggccgtgtatgggatgaccttcaaaattctttgcatctcctgcaagcgccgcagcgagaccaacgctgagaccttcaccgagtggaccttccgccagaagggcactgaggagtttgtcaagatcctgcgctatgagaatgaggtgttgcagctggaggaggatgagcgcttcgagggccgcgtggtgtggaatggcagccggggcaccaaagacctgcaggatctgtctatcttcatcaccaatgtcacctacaaccactcgggcgactacgagtgccacgtctaccgcctgctcttcttcgaaaactacgagcacaacaccagcgtcgtcaagaagatccacattgaggtagtggacaaagccaacagagacatggcatccatcgtgtctgagatcatgatgtatgtgctcattgtggtgttgaccatatggctcgtggcagagatgatttactgctacaagaagatcgctgccgccacggagactgctgcacaggagaatgcctcggaatacctggccatcacctctgaaagcaaagagaactgcacgggcgtccaggtggccgaaggaagcggagctactaacttcagcctgctgaagcaggctggagacgtggaggagaaccctggacctatgcacagagatgcctggctacctcgccctgccttcagcctcacggggctcagtctctttttctctttggtgccaccaggacggagcatggaggtcacagtacctgccaccctcaacgtcctcaatggctctgacgcccgcctgccctgcaccttcaactcctgctacacagtgaaccacaaacagttctccctgaactggacttaccaggagtgcaacaactgctctgaggagatgttcctccagttccgcatgaagatcattaacctgaagctggagcggtttcaagaccgcgtggagttctcagggaaccccagcaagtacgatgtgtcggtgatgctgagaaacgtgcagccggaggatgaggggatttacaactgctacatcatgaacccccctgaccgccaccgtggccatggcaagatccatctgcaggtcctcatggaagagccccctgagcgggactccacggtggccgtgattgtgggtgcctccgtcgggggcttcctggctgtggtcatcttggtgctgatggtggtcaagtgtgtgaggagaaaaaaagagcagaagctgagcacagatgacctgaagaccgaggaggagggcaagacggacggtgaaggcaacccggatgatggcgccaagggaagcggagctactaacttcagcctgctgaagcaggctggagacgtggaggagaaccctggacctatgcctgccttcaatagattgtttcccctggcttctctcgtgcttatctactgggtcagtgtctgcttccctgtgtgtgtggaagtgccctcggagacggaggccgtgcagggcaaccccatgaagctgcgctgcatctcctgcatgaagagagaggaggtggaggccaccacggtggtggaatggttctacaggcccgagggcggtaaagatttccttatttacgagtatcggaatggccaccaggaggtggagagcccctttcaggggcgcctgcagtggaatggcagcaaggacctgcaggacgtgtccatcactgtgctcaacgtcactctgaacgactctggcctctacacctgcaatgtgtcccgggagtttgagtttgaggcgcatcggccctttgtgaagacgacgcggctgatccccctaagagtcaccgaggaggctggagaggacttcacctctgtggtctcagaaatcatgatgtacatccttctggtcttcctcaccttgtggctgctcatcgagatgatatattgctacagaaaggtctcaaaagccgaagaggcagcccaagaaaacgcgtctgactaccttgccatcccatctgagaacaaggagaactctgcggtaccagtggaggaatag

SEQ ID NO: 64 - DNA, 6720 bp, Artificial Sequence
  Polynucleotide encoding hNav1.3+P2A+hNavBeta1
atggcccaggccctgctggtgccccccggccccgagagcttcagactgttcaccagagagagcctggccgccatcgagaagagagccgccgaggagaaggccaagaagcccaagaaggagcaggacaacgacgacgagaacaagcccaagcccaacagcgacctggaggccggcaagaacctgcccttcatctacggcgacatcccccccgagatggtgagcgagcccctggaggacctggacccctactacatcaacaagaagaccttcatcgtgatgaacaagggcaaggccatcttcagattcagcgccaccagcgccctgtacatcctgacccccctgaaccccgtgagaaagatcgccatcaagatcctggtgcacagcctgttcagcatgctgatcatgtgcaccatcctgaccaactgcgtgttcatgaccctgagcaacccccccgactggaccaagaacgtggagtacaccttcaccggcatctacaccttcgagagcctgatcaagatcctggccagaggcttctgcctggaggacttcaccttcctgagagacccctggaactggctggacttcagcgtgatcgtgatggcctacgtgaccgagttcgtgagcctgggcaacgtgagcgccctgagaaccttcagagtgctgagagccctgaagaccatcagcgtgatccccggcctgaagaccatcgtgggcgccctgatccagagcgtgaagaagctgagcgacgtgatgatcctgaccgtgttctgcctgagcgtgttcgccctgatcggcctgcagctgttcatgggcaacctgagaaacaagtgcctgcagtggccccccagcgacagcgccttcgagaccaacaccaccagctacttcaacggcaccatggacagcaacggcaccttcgtgaacgtgaccatgagcaccttcaactggaaggactacatcggcgacgacagccacttctacgtgctggacggccagaaggaccccctgctgtgcggcaacggcagcgacgccggccagtgccccgagggctacatctgcgtgaaggccggcagaaaccccaactacggctacaccagcttcgacaccttcagctgggccttcctgagcctgttcagactgatgacccaggactactgggagaacctgtaccagctgaccctgagagccgccggcaagacctacatgatcttcttcgtgctggtgatcttcctgggcagcttctacctggtgaacctgatcctggccgtggtggccatggcctacgaggagcagaaccaggccaccctggaggaggccgagcagaaggaggccgagttccagcagatgctggagcagctgaagaagcagcaggaggaggcccaggccgtggccgccgccagcgccgccagcagagacttcagcggcatcggcggcctgggcgagctgctggagagcagcagcgaggccagcaagctgagcagcaagagcgccaaggagtggagaaacagaagaaagaagagaagacagagagagcacctggagggcaacaacaagggcgagagagacagcttccccaagagcgagagcgaggacagcgtgaagagaagcagcttcctgttcagcatggacggcaacagactgaccagcgacaagaagttctgcagcccccaccagagcctgctgagcatcagaggcagcctgttcagccccagaagaaacagcaagaccagcatcttcagcttcagaggcagagccaaggacgtgggcagcgagaacgacttcgccgacgacgagcacagcaccttcgaggacagcgagagcagaagagacagcctgttcgtgccccacagacacggcgagagaagaaacagcaacgtgagccaggccagcatgagcagcagaatggtgcccggcctgcccgccaacggcaagatgcacagcaccgtggactgcaacggcgtggtgagcctggtgggcggccccagcgccctgaccagccccaccggccagctgccccccgagggcaccaccaccgagaccgaggtgagaaagagaagactgagcagctaccagatcagcatggagatgctggaggacagcagcggcagacagagagccgtgagcatcgccagcatcctgaccaacaccatggaggagctggaggagagcagacagaagtgccccccctgctggtacagattcgccaacgtgttcctgatctgggactgctgcgacgcctggctgaaggtgaagcacctggtgaacctgatcgtgatggaccccttcgtggacctggccatcaccatctgcatcgtgctgaacaccctgttcatggccatggagcactaccccatgaccgagcagttcagcagcgtgctgaccgtgggcaacctggtgttcaccggcatcttcaccgccgagatggtgctgaagatcatcgccatggacccctactactacttccaggagggctggaacatcttcgacggcatcatcgtgagcctgagcctgatggagctgggcctgagcaacgtggagggcctgagcgtgctgagaagcttcagactgctgagagtgttcaagctggccaagagctggcccaccctgaacatgctgatcaagatcatcggcaacagcgtgggcgccctgggcaacctgaccctggtgctggccatcatcgtgttcatcttcgccgtggtgggcatgcagctgttcggcaagagctacaaggagtgcgtgtgcaagatcaacgacgactgcaccctgcccagatggcacatgaacgacttcttccacagcttcctgatcgtgttcagagtgctgtgcggcgagtggatcgagaccatgtgggactgcatggaggtggccggccagaccatgtgcctgatcgtgttcatgctggtgatggtgatcggcaacctggtggtgctgaacctgttcctggccctgctgctgagcagcttcagcagcgacaacctggccgccaccgacgacgacaacgagatgaacaacctgcagatcgccgtgggcagaatgcagaagggcatcgactacgtgaagaacaagatgagagagtgcttccagaaggccttcttcagaaagcccaaggtgatcgagatccacgagggcaacaagatcgacagctgcatgagcaacaacaccggcatcgagatcagcaaggagctgaactacctgagagacggcaacggcaccaccagcggcgtgggcaccggcagcagcgtggagaagtacgtgatcgacgagaacgactacatgagcttcatcaacaaccccagcctgaccgtgaccgtgcccatcgccgtgggcgagagcgacttcgagaacctgaacaccgaggagttcagcagcgagagcgagctggaggagagcaaggagaagctgaacgccaccagcagcagcgagggcagcaccgtggacgtggtgctgcccagagagggcgagcaggccgagaccgagcccgaggaggacctgaagcccgaggcctgcttcaccgagggctgcatcaagaagttccccttctgccaggtgagcaccgaggagggcaagggcaagatctggtggaacctgagaaagacctgctacagcatcgtggagcacaactggttcgagaccttcatcgtgttcatgatcctgctgagcagcggcgccctggccttcgaggacatctacatcgagcagagaaagaccatcaagaccatgctggagtacgccgacaaggtgttcacctacatcttcatcctggagatgctgctgaagtgggtggcctacggcttccagacctacttcaccaacgcctggtgctggctggacttcctgatcgtggacgtgagcctggtgagcctggtggccaacgccctgggctacagcgagctgggcgccatcaagagcctgagaaccctgagagccctgagacccctgagagccctgagcagattcgagggcatgagagtggtggtgaacgccctggtgggcgccatccccagcatcatgaacgtgctgctggtgtgcctgatcttctggctgatcttcagcatcatgggcgtgaacctgttcgccggcaagttctaccactgcgtgaacatgaccaccggcaacatgttcgacatcagcgacgtgaacaacctgagcgactgccaggccctgggcaagcaggccagatggaagaacgtgaaggtgaacttcgacaacgtgggcgccggctacctggccctgctgcaggtggccaccttcaagggctggatggacatcatgtacgccgccgtggacagcagagacgtgaagctgcagcccgtgtacgaggagaacctgtacatgtacctgtacttcgtgatcttcatcatcttcggcagcttcttcaccctgaacctgttcatcggcgtgatcatcgacaacttcaaccagcagaagaagaagttcggcggccaggacatcttcatgaccgaggagcagaagaagtactacaacgccatgaagaagctgggcagcaagaagccccagaagcccatccccagacccgccaacaagttccagggcatggtgttcgacttcgtgaccagacaggtgttcgacatcagcatcatgatcctgatctgcctgaacatggtgaccatgatggtggagaccgacgaccagggcaagtacatgaccctggtgctgagcagaatcaacctggtgttcatcgtgctgttcaccggcgagttcgtgctgaagctggtgagcctgagacactactacttcaccatcggctggaacatcttcgacttcgtggtggtgatcctgagcatcgtgggcatgttcctggccgagatgatcgagaagtacttcgtgagccccaccctgttcagagtgatcagactggccagaatcggcagaatcctgagactgatcaagggcgccaagggcatcagaaccctgctgttcgccctgatgatgagcctgcccgccctgttcaacatcggcctgctgctgttcctggtgatgttcatctacgccatcttcggcatgagcaacttcgcctacgtgaagaaggaggccggcatcgacgacatgttcaacttcgagaccttcggcaacagcatgatctgcctgttccagatcaccaccagcgccggctgggacggcctgctggcccccatcctgaacagcgccccccccgactgcgaccccgacaccatccaccccggcagcagcgtgaagggcgactgcggcaaccccagcgtgggcatcttcttcttcgtgagctacatcatcatcagcttcctggtggtggtgaacatgtacatcgccgtgatcctggagaacttcagcgtggccaccgaggagagcgccgagcccctgagcgaggacgacttcgagatgttctacgaggtgtgggagaagttcgaccccgacgccacccagttcatcgagttcagcaagctgagcgacttcgccgccgccctggacccccccctgctgatcgccaagcccaacaaggtgcagctgatcgccatggacctgcccatggtgagcggcgacagaatccactgcctggacatcctgttcgccttcaccaagagagtgctgggcgagagcggcgagatggacgccctgagaatccagatggaggacagattcatggccagcaaccccagcaaggtgagctacgagcccatcaccaccaccctgaagagaaagcaggaggaggtgagcgccgccatcatccagagaaacttcagatgctacctgctgaagcagagactgaagaacatcagcagcaactacaacaaggaggccatcaagggcagaatcgacctgcccatcaagcaggacatgatcatcgacaagctgaacggcaacagcacccccgagaagaccgacggcagcagcagcaccaccagcccccccagctacgacagcgtgaccaagcccgacaaggagaagttcgagaaggacaagcccgagaaggagagcaagggcaaggaggtgagagagaaccagaagggaagcggagctactaacttcagcctgctgaagcaggctggagacgtggaggagaaccctggacctatggggaggctgctggccttagtggtcggcgcggcactggtgtcctcagcctgcgggggctgcgtggaggtggactcggagaccgaggccgtgtatgggatgaccttcaaaattctttgcatctcctgcaagcgccgcagcgagaccaacgctgagaccttcaccgagtggaccttccgccagaagggcactgaggagtttgtcaagatcctgcgctatgagaatgaggtgttgcagctggaggaggatgagcgcttcgagggccgcgtggtgtggaatggcagccggggcaccaaagacctgcaggatctgtctatcttcatcaccaatgtcacctacaaccactcgggcgactacgagtgccacgtctaccgcctgctcttcttcgaaaactacgagcacaacaccagcgtcgtcaagaagatccacattgaggtagtggacaaagccaacagagacatggcatccatcgtgtctgagatcatgatgtatgtgctcattgtggtgttgaccatatggctcgtggcagagatgatttactgctacaagaagatcgctgccgccacggagactgctgcacaggagaatgcctcggaatacctggccatcacctctgaaagcaaagagaactgcacgggcgtccaggtggccgaa

SEQ ID NO: 65 - DNA, 7431 bp, Artificial Sequence
  Polynucleotide encoding hNav1.3+P2A+hNavBeta1+P2A+hNavBeta2
atggcccaggccctgctggtgccccccggccccgagagcttcagactgttcaccagagagagcctggccgccatcgagaagagagccgccgaggagaaggccaagaagcccaagaaggagcaggacaacgacgacgagaacaagcccaagcccaacagcgacctggaggccggcaagaacctgcccttcatctacggcgacatcccccccgagatggtgagcgagcccctggaggacctggacccctactacatcaacaagaagaccttcatcgtgatgaacaagggcaaggccatcttcagattcagcgccaccagcgccctgtacatcctgacccccctgaaccccgtgagaaagatcgccatcaagatcctggtgcacagcctgttcagcatgctgatcatgtgcaccatcctgaccaactgcgtgttcatgaccctgagcaacccccccgactggaccaagaacgtggagtacaccttcaccggcatctacaccttcgagagcctgatcaagatcctggccagaggcttctgcctggaggacttcaccttcctgagagacccctggaactggctggacttcagcgtgatcgtgatggcctacgtgaccgagttcgtgagcctgggcaacgtgagcgccctgagaaccttcagagtgctgagagccctgaagaccatcagcgtgatccccggcctgaagaccatcgtgggcgccctgatccagagcgtgaagaagctgagcgacgtgatgatcctgaccgtgttctgcctgagcgtgttcgccctgatcggcctgcagctgttcatgggcaacctgagaaacaagtgcctgcagtggccccccagcgacagcgccttcgagaccaacaccaccagctacttcaacggcaccatggacagcaacggcaccttcgtgaacgtgaccatgagcaccttcaactggaaggactacatcggcgacgacagccacttctacgtgctggacggccagaaggaccccctgctgtgcggcaacggcagcgacgccggccagtgccccgagggctacatctgcgtgaaggccggcagaaaccccaactacggctacaccagcttcgacaccttcagctgggccttcctgagcctgttcagactgatgacccaggactactgggagaacctgtaccagctgaccctgagagccgccggcaagacctacatgatcttcttcgtgctggtgatcttcctgggcagcttctacctggtgaacctgatcctggccgtggtggccatggcctacgaggagcagaaccaggccaccctggaggaggccgagcagaaggaggccgagttccagcagatgctggagcagctgaagaagcagcaggaggaggcccaggccgtggccgccgccagcgccgccagcagagacttcagcggcatcggcggcctgggcgagctgctggagagcagcagcgaggccagcaagctgagcagcaagagcgccaaggagtggagaaacagaagaaagaagagaagacagagagagcacctggagggcaacaacaagggcgagagagacagcttccccaagagcgagagcgaggacagcgtgaagagaagcagcttcctgttcagcatggacggcaacagactgaccagcgacaagaagttctgcagcccccaccagagcctgctgagcatcagaggcagcctgttcagccccagaagaaacagcaagaccagcatcttcagcttcagaggcagagccaaggacgtgggcagcgagaacgacttcgccgacgacgagcacagcaccttcgaggacagcgagagcagaagagacagcctgttcgtgccccacagacacggcgagagaagaaacagcaacgtgagccaggccagcatgagcagcagaatggtgcccggcctgcccgccaacggcaagatgcacagcaccgtggactgcaacggcgtggtgagcctggtgggcggccccagcgccctgaccagccccaccggccagctgccccccgagggcaccaccaccgagaccgaggtgagaaagagaagactgagcagctaccagatcagcatggagatgctggaggacagcagcggcagacagagagccgtgagcatcgccagcatcctgaccaacaccatggaggagctggaggagagcagacagaagtgccccccctgctggtacagattcgccaacgtgttcctgatctgggactgctgcgacgcctggctgaaggtgaagcacctggtgaacctgatcgtgatggaccccttcgtggacctggccatcaccatctgcatcgtgctgaacaccctgttcatggccatggagcactaccccatgaccgagcagttcagcagcgtgctgaccgtgggcaacctggtgttcaccggcatcttcaccgccgagatggtgctgaagatcatcgccatggacccctactactacttccaggagggctggaacatcttcgacggcatcatcgtgagcctgagcctgatggagctgggcctgagcaacgtggagggcctgagcgtgctgagaagcttcagactgctgagagtgttcaagctggccaagagctggcccaccctgaacatgctgatcaagatcatcggcaacagcgtgggcgccctgggcaacctgaccctggtgctggccatcatcgtgttcatcttcgccgtggtgggcatgcagctgttcggcaagagctacaaggagtgcgtgtgcaagatcaacgacgactgcaccctgcccagatggcacatgaacgacttcttccacagcttcctgatcgtgttcagagtgctgtgcggcgagtggatcgagaccatgtgggactgcatggaggtggccggccagaccatgtgcctgatcgtgttcatgctggtgatggtgatcggcaacctggtggtgctgaacctgttcctggccctgctgctgagcagcttcagcagcgacaacctggccgccaccgacgacgacaacgagatgaacaacctgcagatcgccgtgggcagaatgcagaagggcatcgactacgtgaagaacaagatgagagagtgcttccagaaggccttcttcagaaagcccaaggtgatcgagatccacgagggcaacaagatcgacagctgcatgagcaacaacaccggcatcgagatcagcaaggagctgaactacctgagagacggcaacggcaccaccagcggcgtgggcaccggcagcagcgtggagaagtacgtgatcgacgagaacgactacatgagcttcatcaacaaccccagcctgaccgtgaccgtgcccatcgccgtgggcgagagcgacttcgagaacctgaacaccgaggagttcagcagcgagagcgagctggaggagagcaaggagaagctgaacgccaccagcagcagcgagggcagcaccgtggacgtggtgctgcccagagagggcgagcaggccgagaccgagcccgaggaggacctgaagcccgaggcctgcttcaccgagggctgcatcaagaagttccccttctgccaggtgagcaccgaggagggcaagggcaagatctggtggaacctgagaaagacctgctacagcatcgtggagcacaactggttcgagaccttcatcgtgttcatgatcctgctgagcagcggcgccctggccttcgaggacatctacatcgagcagagaaagaccatcaagaccatgctggagtacgccgacaaggtgttcacctacatcttcatcctggagatgctgctgaagtgggtggcctacggcttccagacctacttcaccaacgcctggtgctggctggacttcctgatcgtggacgtgagcctggtgagcctggtggccaacgccctgggctacagcgagctgggcgccatcaagagcctgagaaccctgagagccctgagacccctgagagccctgagcagattcgagggcatgagagtggtggtgaacgccctggtgggcgccatccccagcatcatgaacgtgctgctggtgtgcctgatcttctggctgatcttcagcatcatgggcgtgaacctgttcgccggcaagttctaccactgcgtgaacatgaccaccggcaacatgttcgacatcagcgacgtgaacaacctgagcgactgccaggccctgggcaagcaggccagatggaagaacgtgaaggtgaacttcgacaacgtgggcgccggctacctggccctgctgcaggtggccaccttcaagggctggatggacatcatgtacgccgccgtggacagcagagacgtgaagctgcagcccgtgtacgaggagaacctgtacatgtacctgtacttcgtgatcttcatcatcttcggcagcttcttcaccctgaacctgttcatcggcgtgatcatcgacaacttcaaccagcagaagaagaagttcggcggccaggacatcttcatgaccgaggagcagaagaagtactacaacgccatgaagaagctgggcagcaagaagccccagaagcccatccccagacccgccaacaagttccagggcatggtgttcgacttcgtgaccagacaggtgttcgacatcagcatcatgatcctgatctgcctgaacatggtgaccatgatggtggagaccgacgaccagggcaagtacatgaccctggtgctgagcagaatcaacctggtgttcatcgtgctgttcaccggcgagttcgtgctgaagctggtgagcctgagacactactacttcaccatcggctggaacatcttcgacttcgtggtggtgatcctgagcatcgtgggcatgttcctggccgagatgatcgagaagtacttcgtgagccccaccctgttcagagtgatcagactggccagaatcggcagaatcctgagactgatcaagggcgccaagggcatcagaaccctgctgttcgccctgatgatgagcctgcccgccctgttcaacatcggcctgctgctgttcctggtgatgttcatctacgccatcttcggcatgagcaacttcgcctacgtgaagaaggaggccggcatcgacgacatgttcaacttcgagaccttcggcaacagcatgatctgcctgttccagatcaccaccagcgccggctgggacggcctgctggcccccatcctgaacagcgccccccccgactgcgaccccgacaccatccaccccggcagcagcgtgaagggcgactgcggcaaccccagcgtgggcatcttcttcttcgtgagctacatcatcatcagcttcctggtggtggtgaacatgtacatcgccgtgatcctggagaacttcagcgtggccaccgaggagagcgccgagcccctgagcgaggacgacttcgagatgttctacgaggtgtgggagaagttcgaccccgacgccacccagttcatcgagttcagcaagctgagcgacttcgccgccgccctggacccccccctgctgatcgccaagcccaacaaggtgcagctgatcgccatggacctgcccatggtgagcggcgacagaatccactgcctggacatcctgttcgccttcaccaagagagtgctgggcgagagcggcgagatggacgccctgagaatccagatggaggacagattcatggccagcaaccccagcaaggtgagctacgagcccatcaccaccaccctgaagagaaagcaggaggaggtgagcgccgccatcatccagagaaacttcagatgctacctgctgaagcagagactgaagaacatcagcagcaactacaacaaggaggccatcaagggcagaatcgacctgcccatcaagcaggacatgatcatcgacaagctgaacggcaacagcacccccgagaagaccgacggcagcagcagcaccaccagcccccccagctacgacagcgtgaccaagcccgacaaggagaagttcgagaaggacaagcccgagaaggagagcaagggcaaggaggtgagagagaaccagaagggaagcggagctactaacttcagcctgctgaagcaggctggagacgtggaggagaaccctggacctatggggaggctgctggccttagtggtcggcgcggcactggtgtcctcagcctgcgggggctgcgtggaggtggactcggagaccgaggccgtgtatgggatgaccttcaaaattctttgcatctcctgcaagcgccgcagcgagaccaacgctgagaccttcaccgagtggaccttccgccagaagggcactgaggagtttgtcaagatcctgcgctatgagaatgaggtgttgcagctggaggaggatgagcgcttcgagggccgcgtggtgtggaatggcagccggggcaccaaagacctgcaggatctgtctatcttcatcaccaatgtcacctacaaccactcgggcgactacgagtgccacgtctaccgcctgctcttcttcgaaaactacgagcacaacaccagcgtcgtcaagaagatccacattgaggtagtggacaaagccaacagagacatggcatccatcgtgtctgagatcatgatgtatgtgctcattgtggtgttgaccatatggctcgtggcagagatgatttactgctacaagaagatcgctgccgccacggagactgctgcacaggagaatgcctcggaatacctggccatcacctctgaaagcaaagagaactgcacgggcgtccaggtggccgaaggaagcggagctactaacttcagcctgctgaagcaggctggagacgtggaggagaaccctggacctatgcacagagatgcctggctacctcgccctgccttcagcctcacggggctcagtctctttttctctttggtgccaccaggacggagcatggaggtcacagtacctgccaccctcaacgtcctcaatggctctgacgcccgcctgccctgcaccttcaactcctgctacacagtgaaccacaaacagttctccctgaactggacttaccaggagtgcaacaactgctctgaggagatgttcctccagttccgcatgaagatcattaacctgaagctggagcggtttcaagaccgcgtggagttctcagggaaccccagcaagtacgatgtgtcggtgatgctgagaaacgtgcagccggaggatgaggggatttacaactgctacatcatgaacccccctgaccgccaccgtggccatggcaagatccatctgcaggtcctcatggaagagccccctgagcgggactccacggtggccgtgattgtgggtgcctccgtcgggggcttcctggctgtggtcatcttggtgctgatggtggtcaagtgtgtgaggagaaaaaaagagcagaagctgagcacagatgacctgaagaccgaggaggagggcaagacggacggtgaaggcaacccggatgatggcgccaag

SEQ ID NO: 66 - DNA, 8145 bp, Artificial Sequence
  Polynucleotide encoding hNav1.3+P2A+hNavBeta1+P2A+hNavBeta2+P2A+hNavBeta3
atggcccaggccctgctggtgccccccggccccgagagcttcagactgttcaccagagagagcctggccgccatcgagaagagagccgccgaggagaaggccaagaagcccaagaaggagcaggacaacgacgacgagaacaagcccaagcccaacagcgacctggaggccggcaagaacctgcccttcatctacggcgacatcccccccgagatggtgagcgagcccctggaggacctggacccctactacatcaacaagaagaccttcatcgtgatgaacaagggcaaggccatcttcagattcagcgccaccagcgccctgtacatcctgacccccctgaaccccgtgagaaagatcgccatcaagatcctggtgcacagcctgttcagcatgctgatcatgtgcaccatcctgaccaactgcgtgttcatgaccctgagcaacccccccgactggaccaagaacgtggagtacaccttcaccggcatctacaccttcgagagcctgatcaagatcctggccagaggcttctgcctggaggacttcaccttcctgagagacccctggaactggctggacttcagcgtgatcgtgatggcctacgtgaccgagttcgtgagcctgggcaacgtgagcgccctgagaaccttcagagtgctgagagccctgaagaccatcagcgtgatccccggcctgaagaccatcgtgggcgccctgatccagagcgtgaagaagctgagcgacgtgatgatcctgaccgtgttctgcctgagcgtgttcgccctgatcggcctgcagctgttcatgggcaacctgagaaacaagtgcctgcagtggccccccagcgacagcgccttcgagaccaacaccaccagctacttcaacggcaccatggacagcaacggcaccttcgtgaacgtgaccatgagcaccttcaactggaaggactacatcggcgacgacagccacttctacgtgctggacggccagaaggaccccctgctgtgcggcaacggcagcgacgccggccagtgccccgagggctacatctgcgtgaaggccggcagaaaccccaactacggctacaccagcttcgacaccttcagctgggccttcctgagcctgttcagactgatgacccaggactactgggagaacctgtaccagctgaccctgagagccgccggcaagacctacatgatcttcttcgtgctggtgatcttcctgggcagcttctacctggtgaacctgatcctggccgtggtggccatggcctacgaggagcagaaccaggccaccctggaggaggccgagcagaaggaggccgagttccagcagatgctggagcagctgaagaagcagcaggaggaggcccaggccgtggccgccgccagcgccgccagcagagacttcagcggcatcggcggcctgggcgagctgctggagagcagcagcgaggccagcaagctgagcagcaagagcgccaaggagtggagaaacagaagaaagaagagaagacagagagagcacctggagggcaacaacaagggcgagagagacagcttccccaagagcgagagcgaggacagcgtgaagagaagcagcttcctgttcagcatggacggcaacagactgaccagcgacaagaagttctgcagcccccaccagagcctgctgagcatcagaggcagcctgttcagccccagaagaaacagcaagaccagcatcttcagcttcagaggcagagccaaggacgtgggcagcgagaacgacttcgccgacgacgagcacagcaccttcgaggacagcgagagcagaagagacagcctgttcgtgccccacagacacggcgagagaagaaacagcaacgtgagccaggccagcatgagcagcagaatggtgcccggcctgcccgccaacggcaagatgcacagcaccgtggactgcaacggcgtggtgagcctggtgggcggccccagcgccctgaccagccccaccggccagctgccccccgagggcaccaccaccgagaccgaggtgagaaagagaagactgagcagctaccagatcagcatggagatgctggaggacagcagcggcagacagagagccgtgagcatcgccagcatcctgaccaacaccatggaggagctggaggagagcagacagaagtgccccccctgctggtacagattcgccaacgtgttcctgatctgggactgctgcgacgcctggctgaaggtgaagcacctggtgaacctgatcgtgatggaccccttcgtggacctggccatcaccatctgcatcgtgctgaacaccctgttcatggccatggagcactaccccatgaccgagcagttcagcagcgtgctgaccgtgggcaacctggtgttcaccggcatcttcaccgccgagatggtgctgaagatcatcgccatggacccctactactacttccaggagggctggaacatcttcgacggcatcatcgtgagcctgagcctgatggagctgggcctgagcaacgtggagggcctgagcgtgctgagaagcttcagactgctgagagtgttcaagctggccaagagctggcccaccctgaacatgctgatcaagatcatcggcaacagcgtgggcgccctgggcaacctgaccctggtgctggccatcatcgtgttcatcttcgccgtggtgggcatgcagctgttcggcaagagctacaaggagtgcgtgtgcaagatcaacgacgactgcaccctgcccagatggcacatgaacgacttcttccacagcttcctgatcgtgttcagagtgctgtgcggcgagtggatcgagaccatgtgggactgcatggaggtggccggccagaccatgtgcctgatcgtgttcatgctggtgatggtgatcggcaacctggtggtgctgaacctgttcctggccctgctgctgagcagcttcagcagcgacaacctggccgccaccgacgacgacaacgagatgaacaacctgcagatcgccgtgggcagaatgcagaagggcatcgactacgtgaagaacaagatgagagagtgcttccagaaggccttcttcagaaagcccaaggtgatcgagatccacgagggcaacaagatcgacagctgcatgagcaacaacaccggcatcgagatcagcaaggagctgaactacctgagagacggcaacggcaccaccagcggcgtgggcaccggcagcagcgtggagaagtacgtgatcgacgagaacgactacatgagcttcatcaacaaccccagcctgaccgtgaccgtgcccatcgccgtgggcgagagcgacttcgagaacctgaacaccgaggagttcagcagcgagagcgagctggaggagagcaaggagaagctgaacgccaccagcagcagcgagggcagcaccgtggacgtggtgctgcccagagagggcgagcaggccgagaccgagcccgaggaggacctgaagcccgaggcctgcttcaccgagggctgcatcaagaagttccccttctgccaggtgagcaccgaggagggcaagggcaagatctggtggaacctgagaaagacctgctacagcatcgtggagcacaactggttcgagaccttcatcgtgttcatgatcctgctgagcagcggcgccctggccttcgaggacatctacatcgagcagagaaagaccatcaagaccatgctggagtacgccgacaaggtgttcacctacatcttcatcctggagatgctgctgaagtgggtggcctacggcttccagacctacttcaccaacgcctggtgctggctggacttcctgatcgtggacgtgagcctggtgagcctggtggccaacgccctgggctacagcgagctgggcgccatcaagagcctgagaaccctgagagccctgagacccctgagagccctgagcagattcgagggcatgagagtggtggtgaacgccctggtgggcgccatccccagcatcatgaacgtgctgctggtgtgcctgatcttctggctgatcttcagcatcatgggcgtgaacctgttcgccggcaagttctaccactgcgtgaacatgaccaccggcaacatgttcgacatcagcgacgtgaacaacctgagcgactgccaggccctgggcaagcaggccagatggaagaacgtgaaggtgaacttcgacaacgtgggcgccggctacctggccctgctgcaggtggccaccttcaagggctggatggacatcatgtacgccgccgtggacagcagagacgtgaagctgcagcccgtgtacgaggagaacctgtacatgtacctgtacttcgtgatcttcatcatcttcggcagcttcttcaccctgaacctgttcatcggcgtgatcatcgacaacttcaaccagcagaagaagaagttcggcggccaggacatcttcatgaccgaggagcagaagaagtactacaacgccatgaagaagctgggcagcaagaagccccagaagcccatccccagacccgccaacaagttccagggcatggtgttcgacttcgtgaccagacaggtgttcgacatcagcatcatgatcctgatctgcctgaacatggtgaccatgatggtggagaccgacgaccagggcaagtacatgaccctggtgctgagcagaatcaacctggtgttcatcgtgctgttcaccggcgagttcgtgctgaagctggtgagcctgagacactactacttcaccatcggctggaacatcttcgacttcgtggtggtgatcctgagcatcgtgggcatgttcctggccgagatgatcgagaagtacttcgtgagccccaccctgttcagagtgatcagactggccagaatcggcagaatcctgagactgatcaagggcgccaagggcatcagaaccctgctgttcgccctgatgatgagcctgcccgccctgttcaacatcggcctgctgctgttcctggtgatgttcatctacgccatcttcggcatgagcaacttcgcctacgtgaagaaggaggccggcatcgacgacatgttcaacttcgagaccttcggcaacagcatgatctgcctgttccagatcaccaccagcgccggctgggacggcctgctggcccccatcctgaacagcgccccccccgactgcgaccccgacaccatccaccccggcagcagcgtgaagggcgactgcggcaaccccagcgtgggcatcttcttcttcgtgagctacatcatcatcagcttcctggtggtggtgaacatgtacatcgccgtgatcctggagaacttcagcgtggccaccgaggagagcgccgagcccctgagcgaggacgacttcgagatgttctacgaggtgtgggagaagttcgaccccgacgccacccagttcatcgagttcagcaagctgagcgacttcgccgccgccctggacccccccctgctgatcgccaagcccaacaaggtgcagctgatcgccatggacctgcccatggtgagcggcgacagaatccactgcctggacatcctgttcgccttcaccaagagagtgctgggcgagagcggcgagatggacgccctgagaatccagatggaggacagattcatggccagcaaccccagcaaggtgagctacgagcccatcaccaccaccctgaagagaaagcaggaggaggtgagcgccgccatcatccagagaaacttcagatgctacctgctgaagcagagactgaagaacatcagcagcaactacaacaaggaggccatcaagggcagaatcgacctgcccatcaagcaggacatgatcatcgacaagctgaacggcaacagcacccccgagaagaccgacggcagcagcagcaccaccagcccccccagctacgacagcgtgaccaagcccgacaaggagaagttcgagaaggacaagcccgagaaggagagcaagggcaaggaggtgagagagaaccagaagggaagcggagctactaacttcagcctgctgaagcaggctggagacgtggaggagaaccctggacctatggggaggctgctggccttagtggtcggcgcggcactggtgtcctcagcctgcgggggctgcgtggaggtggactcggagaccgaggccgtgtatgggatgaccttcaaaattctttgcatctcctgcaagcgccgcagcgagaccaacgctgagaccttcaccgagtggaccttccgccagaagggcactgaggagtttgtcaagatcctgcgctatgagaatgaggtgttgcagctggaggaggatgagcgcttcgagggccgcgtggtgtggaatggcagccggggcaccaaagacctgcaggatctgtctatcttcatcaccaatgtcacctacaaccactcgggcgactacgagtgccacgtctaccgcctgctcttcttcgaaaactacgagcacaacaccagcgtcgtcaagaagatccacattgaggtagtggacaaagccaacagagacatggcatccatcgtgtctgagatcatgatgtatgtgctcattgtggtgttgaccatatggctcgtggcagagatgatttactgctacaagaagatcgctgccgccacggagactgctgcacaggagaatgcctcggaatacctggccatcacctctgaaagcaaagagaactgcacgggcgtccaggtggccgaaggaagcggagctactaacttcagcctgctgaagcaggctggagacgtggaggagaaccctggacctatgcacagagatgcctggctacctcgccctgccttcagcctcacggggctcagtctctttttctctttggtgccaccaggacggagcatggaggtcacagtacctgccaccctcaacgtcctcaatggctctgacgcccgcctgccctgcaccttcaactcctgctacacagtgaaccacaaacagttctccctgaactggacttaccaggagtgcaacaactgctctgaggagatgttcctccagttccgcatgaagatcattaacctgaagctggagcggtttcaagaccgcgtggagttctcagggaaccccagcaagtacgatgtgtcggtgatgctgagaaacgtgcagccggaggatgaggggatttacaactgctacatcatgaacccccctgaccgccaccgtggccatggcaagatccatctgcaggtcctcatggaagagccccctgagcgggactccacggtggccgtgattgtgggtgcctccgtcgggggcttcctggctgtggtcatcttggtgctgatggtggtcaagtgtgtgaggagaaaaaaagagcagaagctgagcacagatgacctgaagaccgaggaggagggcaagacggacggtgaaggcaacccggatgatggcgccaagggaagcggagctactaacttcagcctgctgaagcaggctggagacgtggaggagaaccctggacctatgcctgccttcaatagattgtttcccctggcttctctcgtgcttatctactgggtcagtgtctgcttccctgtgtgtgtggaagtgccctcggagacggaggccgtgcagggcaaccccatgaagctgcgctgcatctcctgcatgaagagagaggaggtggaggccaccacggtggtggaatggttctacaggcccgagggcggtaaagatttccttatttacgagtatcggaatggccaccaggaggtggagagcccctttcaggggcgcctgcagtggaatggcagcaaggacctgcaggacgtgtccatcactgtgctcaacgtcactctgaacgactctggcctctacacctgcaatgtgtcccgggagtttgagtttgaggcgcatcggccctttgtgaagacgacgcggctgatccccctaagagtcaccgaggaggctggagaggacttcacctctgtggtctcagaaatcatgatgtacatccttctggtcttcctcaccttgtggctgctcatcgagatgatatattgctacagaaaggtctcaaaagccgaagaggcagcccaagaaaacgcgtctgactaccttgccatcccatctgagaacaaggagaactctgcggtaccagtggaggaatag

SEQ ID NO: 67 - DNA, 6228 bp, Artificial Sequence
  Polynucleotide encoding hNav1.4+P2A+hNavBeta1
atggccagacccagcctgtgcaccctggtgcccctgggccccgagtgcctgagacccttcaccagagagagcctggccgccatcgagcagagagccgtggaggaggaggccagactgcagagaaacaagcagatggagatcgaggagcccgagagaaagcccagaagcgacctggaggccggcaagaacctgcccatgatctacggcgaccccccccccgaggtgatcggcatccccctggaggacctggacccctactacagcaacaagaagaccttcatcgtgctgaacaagggcaaggccatcttcagattcagcgccacccccgccctgtacctgctgagccccttcagcgtggtgagaagaggcgccatcaaggtgctgatccacgccctgttcagcatgttcatcatgatcaccatcctgaccaactgcgtgttcatgaccatgagcgacccccccccctggagcaagaacgtggagtacaccttcaccggcatctacaccttcgagagcctgatcaagatcctggccagaggcttctgcgtggacgacttcaccttcctgagagacccctggaactggctggacttcagcgtgatcatgatggcctacctgaccgagttcgtggacctgggcaacatcagcgccctgagaaccttcagagtgctgagagccctgaagaccatcaccgtgatccccggcctgaagaccatcgtgggcgccctgatccagagcgtgaagaagctgagcgacgtgatgatcctgaccgtgttctgcctgagcgtgttcgccctggtgggcctgcagctgttcatgggcaacctgagacagaagtgcgtgagatggcccccccccttcaacgacaccaacaccacctggtacagcaacgacacctggtacggcaacgacacctggtacggcaacgagatgtggtacggcaacgacagctggtacgccaacgacacctggaacagccacgccagctgggccaccaacgacaccttcgactgggacgcctacatcagcgacgagggcaacttctacttcctggagggcagcaacgacgccctgctgtgcggcaacagcagcgacgccggccactgccccgagggctacgagtgcatcaagaccggcagaaaccccaactacggctacaccagctacgacaccttcagctgggccttcctggccctgttcagactgatgacccaggactactgggagaacctgttccagctgaccctgagagccgccggcaagacctacatgatcttcttcgtggtgatcatcttcctgggcagcttctacctgatcaacctgatcctggccgtggtggccatggcctacgccgagcagaacgaggccaccctggccgaggacaaggagaaggaggaggagttccagcagatgctggagaagttcaagaagcaccaggaggagctggagaaggccaaggccgcccaggccctggagggcggcgaggccgacggcgaccccgcccacggcaaggactgcaacggcagcctggacaccagccagggcgagaagggcgcccccagacagagcagcagcggcgacagcggcatcagcgacgccatggaggagctggaggaggcccaccagaagtgccccccctggtggtacaagtgcgcccacaaggtgctgatctggaactgctgcgccccctggctgaagttcaagaacatcatccacctgatcgtgatggaccccttcgtggacctgggcatcaccatctgcatcgtgctgaacaccctgttcatggccatggagcactaccccatgaccgagcacttcgacaacgtgctgaccgtgggcaacctggtgttcaccggcatcttcaccgccgagatggtgctgaagctgatcgccatggacccctacgagtacttccagcagggctggaacatcttcgacagcatcatcgtgaccctgagcctggtggagctgggcctggccaacgtgcagggcctgagcgtgctgagaagcttcagactgctgagagtgttcaagctggccaagagctggcccaccctgaacatgctgatcaagatcatcggcaacagcgtgggcgccctgggcaacctgaccctggtgctggccatcatcgtgttcatcttcgccgtggtgggcatgcagctgttcggcaagagctacaaggagtgcgtgtgcaagatcgccctggactgcaacctgcccagatggcacatgcacgacttcttccacagcttcctgatcgtgttcagaatcctgtgcggcgagtggatcgagaccatgtgggactgcatggaggtggccggccaggccatgtgcctgaccgtgttcctgatggtgatggtgatcggcaacctggtggtgctgaacctgttcctggccctgctgctgagcagcttcagcgccgacagcctggccgccagcgacgaggacggcgagatgaacaacctgcagatcgccatcggcagaatcaagctgggcatcggcttcgccaaggccttcctgctgggcctgctgcacggcaagatcctgagccccaaggacatcatgctgagcctgggcgaggccgacggcgccggcgaggccggcgaggccggcgagaccgcccccgaggacgagaagaaggagccccccgaggaggacctgaagaaggacaaccacatcctgaaccacatgggcctggccgacggcccccccagcagcctggagctggaccacctgaacttcatcaacaacccctacctgaccatccaggtgcccatcgccagcgaggagagcgacctggagatgcccaccgaggaggagaccgacaccttcagcgagcccgaggacagcaagaagcccccccagcccctgtacgacggcaacagcagcgtgtgcagcaccgccgactacaagccccccgaggaggaccccgaggagcaggccgaggagaaccccgagggcgagcagcccgaggagtgcttcaccgaggcctgcgtgcagagatggccctgcctgtacgtggacatcagccagggcagaggcaagaagtggtggaccctgagaagagcctgcttcaagatcgtggagcacaactggttcgagaccttcatcgtgttcatgatcctgctgagcagcggcgccctggccttcgaggacatctacatcgagcagagaagagtgatcagaaccatcctggagtacgccgacaaggtgttcacctacatcttcatcatggagatgctgctgaagtgggtggcctacggcttcaaggtgtacttcaccaacgcctggtgctggctggacttcctgatcgtggacgtgagcatcatcagcctggtggccaactggctgggctacagcgagctgggccccatcaagagcctgagaaccctgagagccctgagacccctgagagccctgagcagattcgagggcatgagagtggtggtgaacgccctgctgggcgccatccccagcatcatgaacgtgctgctggtgtgcctgatcttctggctgatcttcagcatcatgggcgtgaacctgttcgccggcaagttctactactgcatcaacaccaccaccagcgagagattcgacatcagcgaggtgaacaacaagagcgagtgcgagagcctgatgcacaccggccaggtgagatggctgaacgtgaaggtgaactacgacaacgtgggcctgggctacctgagcctgctgcaggtggccaccttcaagggctggatggacatcatgtacgccgccgtggacagcagagagaaggaggagcagccccagtacgaggtgaacctgtacatgtacctgtacttcgtgatcttcatcatcttcggcagcttcttcaccctgaacctgttcatcggcgtgatcatcgacaacttcaaccagcagaagaagaagctgggcggcaaggacatcttcatgaccgaggagcagaagaagtactacaacgccatgaagaagctgggcagcaagaagccccagaagcccatccccagaccccagaacaagatccagggcatggtgtacgacctggtgaccaagcaggccttcgacatcaccatcatgatcctgatctgcctgaacatggtgaccatgatggtggagaccgacaaccagagccagctgaaggtggacatcctgtacaacatcaacatgatcttcatcatcatcttcaccggcgagtgcgtgctgaagatgctggccctgagacagtactacttcaccgtgggctggaacatcttcgacttcgtggtggtgatcctgagcatcgtgggcctggccctgagcgacctgatccagaagtacttcgtgagccccaccctgttcagagtgatcagactggccagaatcggcagagtgctgagactgatcagaggcgccaagggcatcagaaccctgctgttcgccctgatgatgagcctgcccgccctgttcaacatcggcctgctgctgttcctggtgatgttcatctacagcatcttcggcatgagcaacttcgcctacgtgaagaaggagagcggcatcgacgacatgttcaacttcgagaccttcggcaacagcatcatctgcctgttcgagatcaccaccagcgccggctgggacggcctgctgaaccccatcctgaacagcggcccccccgactgcgaccccaacctggagaaccccggcaccagcgtgaagggcgactgcggcaaccccagcatcggcatctgcttcttctgcagctacatcatcatcagcttcctgatcgtggtgaacatgtacatcgccatcatcctggagaacttcaacgtggccaccgaggagagcagcgagcccctgggcgaggacgacttcgagatgttctacgagacctgggagaagttcgaccccgacgccacccagttcatcgcctacagcagactgagcgacttcgtggacaccctgcaggagcccctgagaatcgccaagcccaacaagatcaagctgatcaccctggacctgcccatggtgcccggcgacaagatccactgcctggacatcctgttcgccctgaccaaggaggtgctgggcgacagcggcgagatggacgccctgaagcagaccatggaggagaagttcatggccgccaaccccagcaaggtgagctacgagcccatcaccaccaccctgaagagaaagcacgaggaggtgtgcgccatcaagatccagagagcctacagaagacacctgctgcagagaagcatgaagcaggccagctacatgtacagacacagccacgacggcagcggcgacgacgcccccgagaaggagggcctgctggccaacaccatgagcaagatgtacggccacgagaacggcaacagcagcagccccagccccgaggagaagggcgaggccggcgacgccggccccaccatgggcctgatgcccatcagccccagcgacaccgcctggccccccgcccccccccccggccagaccgtgagacccggcgtgaaggagagcctggtgggaagcggagctactaacttcagcctgctgaagcaggctggagacgtggaggagaaccctggacctatggggaggctgctggccttagtggtcggcgcggcactggtgtcctcagcctgcgggggctgcgtggaggtggactcggagaccgaggccgtgtatgggatgaccttcaaaattctttgcatctcctgcaagcgccgcagcgagaccaacgctgagaccttcaccgagtggaccttccgccagaagggcactgaggagtttgtcaagatcctgcgctatgagaatgaggtgttgcagctggaggaggatgagcgcttcgagggccgcgtggtgtggaatggcagccggggcaccaaagacctgcaggatctgtctatcttcatcaccaatgtcacctacaaccactcgggcgactacgagtgccacgtctaccgcctgctcttcttcgaaaactacgagcacaacaccagcgtcgtcaagaagatccacattgaggtagtggacaaagccaacagagacatggcatccatcgtgtctgagatcatgatgtatgtgctcattgtggtgttgaccatatggctcgtggcagagatgatttactgctacaagaagatcgctgccgccacggagactgctgcacaggagaatgcctcggaatacctggccatcacctctgaaagcaaagagaactgcacgggcgtccaggtggccgaa

SEQ ID NO: 68 - DNA, 6939 bp, Artificial Sequence
  Polynucleotide encoding hNav1.4+P2A+hNavBeta1+P2A+hNavBeta2
atggccagacccagcctgtgcaccctggtgcccctgggccccgagtgcctgagacccttcaccagagagagcctggccgccatcgagcagagagccgtggaggaggaggccagactgcagagaaacaagcagatggagatcgaggagcccgagagaaagcccagaagcgacctggaggccggcaagaacctgcccatgatctacggcgaccccccccccgaggtgatcggcatccccctggaggacctggacccctactacagcaacaagaagaccttcatcgtgctgaacaagggcaaggccatcttcagattcagcgccacccccgccctgtacctgctgagccccttcagcgtggtgagaagaggcgccatcaaggtgctgatccacgccctgttcagcatgttcatcatgatcaccatcctgaccaactgcgtgttcatgaccatgagcgacccccccccctggagcaagaacgtggagtacaccttcaccggcatctacaccttcgagagcctgatcaagatcctggccagaggcttctgcgtggacgacttcaccttcctgagagacccctggaactggctggacttcagcgtgatcatgatggcctacctgaccgagttcgtggacctgggcaacatcagcgccctgagaaccttcagagtgctgagagccctgaagaccatcaccgtgatccccggcctgaagaccatcgtgggcgccctgatccagagcgtgaagaagctgagcgacgtgatgatcctgaccgtgttctgcctgagcgtgttcgccctggtgggcctgcagctgttcatgggcaacctgagacagaagtgcgtgagatggcccccccccttcaacgacaccaacaccacctggtacagcaacgacacctggtacggcaacgacacctggtacggcaacgagatgtggtacggcaacgacagctggtacgccaacgacacctggaacagccacgccagctgggccaccaacgacaccttcgactgggacgcctacatcagcgacgagggcaacttctacttcctggagggcagcaacgacgccctgctgtgcggcaacagcagcgacgccggccactgccccgagggctacgagtgcatcaagaccggcagaaaccccaactacggctacaccagctacgacaccttcagctgggccttcctggccctgttcagactgatgacccaggactactgggagaacctgttccagctgaccctgagagccgccggcaagacctacatgatcttcttcgtggtgatcatcttcctgggcagcttctacctgatcaacctgatcctggccgtggtggccatggcctacgccgagcagaacgaggccaccctggccgaggacaaggagaaggaggaggagttccagcagatgctggagaagttcaagaagcaccaggaggagctggagaaggccaaggccgcccaggccctggagggcggcgaggccgacggcgaccccgcccacggcaaggactgcaacggcagcctggacaccagccagggcgagaagggcgcccccagacagagcagcagcggcgacagcggcatcagcgacgccatggaggagctggaggaggcccaccagaagtgccccccctggtggtacaagtgcgcccacaaggtgctgatctggaactgctgcgccccctggctgaagttcaagaacatcatccacctgatcgtgatggaccccttcgtggacctgggcatcaccatctgcatcgtgctgaacaccctgttcatggccatggagcactaccccatgaccgagcacttcgacaacgtgctgaccgtgggcaacctggtgttcaccggcatcttcaccgccgagatggtgctgaagctgatcgccatggacccctacgagtacttccagcagggctggaacatcttcgacagcatcatcgtgaccctgagcctggtggagctgggcctggccaacgtgcagggcctgagcgtgctgagaagcttcagactgctgagagtgttcaagctggccaagagctggcccaccctgaacatgctgatcaagatcatcggcaacagcgtgggcgccctgggcaacctgaccctggtgctggccatcatcgtgttcatcttcgccgtggtgggcatgcagctgttcggcaagagctacaaggagtgcgtgtgcaagatcgccctggactgcaacctgcccagatggcacatgcacgacttcttccacagcttcctgatcgtgttcagaatcctgtgcggcgagtggatcgagaccatgtgggactgcatggaggtggccggccaggccatgtgcctgaccgtgttcctgatggtgatggtgatcggcaacctggtggtgctgaacctgttcctggccctgctgctgagcagcttcagcgccgacagcctggccgccagcgacgaggacggcgagatgaacaacctgcagatcgccatcggcagaatcaagctgggcatcggcttcgccaaggccttcctgctgggcctgctgcacggcaagatcctgagccccaaggacatcatgctgagcctgggcgaggccgacggcgccggcgaggccggcgaggccggcgagaccgcccccgaggacgagaagaaggagccccccgaggaggacctgaagaaggacaaccacatcctgaaccacatgggcctggccgacggcccccccagcagcctggagctggaccacctgaacttcatcaacaacccctacctgaccatccaggtgcccatcgccagcgaggagagcgacctggagatgcccaccgaggaggagaccgacaccttcagcgagcccgaggacagcaagaagcccccccagcccctgtacgacggcaacagcagcgtgtgcagcaccgccgactacaagccccccgaggaggaccccgaggagcaggccgaggagaaccccgagggcgagcagcccgaggagtgcttcaccgaggcctgcgtgcagagatggccctgcctgtacgtggacatcagccagggcagaggcaagaagtggtggaccctgagaagagcctgcttcaagatcgtggagcacaactggttcgagaccttcatcgtgttcatgatcctgctgagcagcggcgccctggccttcgaggacatctacatcgagcagagaagagtgatcagaaccatcctggagtacgccgacaaggtgttcacctacatcttcatcatggagatgctgctgaagtgggtggcctacggcttcaaggtgtacttcaccaacgcctggtgctggctggacttcctgatcgtggacgtgagcatcatcagcctggtggccaactggctgggctacagcgagctgggccccatcaagagcctgagaaccctgagagccctgagacccctgagagccctgagcagattcgagggcatgagagtggtggtgaacgccctgctgggcgccatccccagcatcatgaacgtgctgctggtgtgcctgatcttctggctgatcttcagcatcatgggcgtgaacctgttcgccggcaagttctactactgcatcaacaccaccaccagcgagagattcgacatcagcgaggtgaacaacaagagcgagtgcgagagcctgatgcacaccggccaggtgagatggctgaacgtgaaggtgaactacgacaacgtgggcctgggctacctgagcctgctgcaggtggccaccttcaagggctggatggacatcatgtacgccgccgtggacagcagagagaaggaggagcagccccagtacgaggtgaacctgtacatgtacctgtacttcgtgatcttcatcatcttcggcagcttcttcaccctgaacctgttcatcggcgtgatcatcgacaacttcaaccagcagaagaagaagctgggcggcaaggacatcttcatgaccgaggagcagaagaagtactacaacgccatgaagaagctgggcagcaagaagccccagaagcccatccccagaccccagaacaagatccagggcatggtgtacgacctggtgaccaagcaggccttcgacatcaccatcatgatcctgatctgcctgaacatggtgaccatgatggtggagaccgacaaccagagccagctgaaggtggacatcctgtacaacatcaacatgatcttcatcatcatcttcaccggcgagtgcgtgctgaagatgctggccctgagacagtactacttcaccgtgggctggaacatcttcgacttcgtggtggtgatcctgagcatcgtgggcctggccctgagcgacctgatccagaagtacttcgtgagccccaccctgttcagagtgatcagactggccagaatcggcagagtgctgagactgatcagaggcgccaagggcatcagaaccctgctgttcgccctgatgatgagcctgcccgccctgttcaacatcggcctgctgctgttcctggtgatgttcatctacagcatcttcggcatgagcaacttcgcctacgtgaagaaggagagcggcatcgacgacatgttcaacttcgagaccttcggcaacagcatcatctgcctgttcgagatcaccaccagcgccggctgggacggcctgctgaaccccatcctgaacagcggcccccccgactgcgaccccaacctggagaaccccggcaccagcgtgaagggcgactgcggcaaccccagcatcggcatctgcttcttctgcagctacatcatcatcagcttcctgatcgtggtgaacatgtacatcgccatcatcctggagaacttcaacgtggccaccgaggagagcagcgagcccctgggcgaggacgacttcgagatgttctacgagacctgggagaagttcgaccccgacgccacccagttcatcgcctacagcagactgagcgacttcgtggacaccctgcaggagcccctgagaatcgccaagcccaacaagatcaagctgatcaccctggacctgcccatggtgcccggcgacaagatccactgcctggacatcctgttcgccctgaccaaggaggtgctgggcgacagcggcgagatggacgccctgaagcagaccatggaggagaagttcatggccgccaaccccagcaaggtgagctacgagcccatcaccaccaccctgaagagaaagcacgaggaggtgtgcgccatcaagatccagagagcctacagaagacacctgctgcagagaagcatgaagcaggccagctacatgtacagacacagccacgacggcagcggcgacgacgcccccgagaaggagggcctgctggccaacaccatgagcaagatgtacggccacgagaacggcaacagcagcagccccagccccgaggagaagggcgaggccggcgacgccggccccaccatgggcctgatgcccatcagccccagcgacaccgcctggccccccgcccccccccccggccagaccgtgagacccggcgtgaaggagagcctggtgggaagcggagctactaacttcagcctgctgaagcaggctggagacgtggaggagaaccctggacctatggggaggctgctggccttagtggtcggcgcggcactggtgtcctcagcctgcgggggctgcgtggaggtggactcggagaccgaggccgtgtatgggatgaccttcaaaattctttgcatctcctgcaagcgccgcagcgagaccaacgctgagaccttcaccgagtggaccttccgccagaagggcactgaggagtttgtcaagatcctgcgctatgagaatgaggtgttgcagctggaggaggatgagcgcttcgagggccgcgtggtgtggaatggcagccggggcaccaaagacctgcaggatctgtctatcttcatcaccaatgtcacctacaaccactcgggcgactacgagtgccacgtctaccgcctgctcttcttcgaaaactacgagcacaacaccagcgtcgtcaagaagatccacattgaggtagtggacaaagccaacagagacatggcatccatcgtgtctgagatcatgatgtatgtgctcattgtggtgttgaccatatggctcgtggcagagatgatttactgctacaagaagatcgctgccgccacggagactgctgcacaggagaatgcctcggaatacctggccatcacctctgaaagcaaagagaactgcacgggcgtccaggtggccgaaggaagcggagctactaacttcagcctgctgaagcaggctggagacgtggaggagaaccctggacctatgcacagagatgcctggctacctcgccctgccttcagcctcacggggctcagtctctttttctctttggtgccaccaggacggagcatggaggtcacagtacctgccaccctcaacgtcctcaatggctctgacgcccgcctgccctgcaccttcaactcctgctacacagtgaaccacaaacagttctccctgaactggacttaccaggagtgcaacaactgctctgaggagatgttcctccagttccgcatgaagatcattaacctgaagctggagcggtttcaagaccgcgtggagttctcagggaaccccagcaagtacgatgtgtcggtgatgctgagaaacgtgcagccggaggatgaggggatttacaactgctacatcatgaacccccctgaccgccaccgtggccatggcaagatccatctgcaggtcctcatggaagagccccctgagcgggactccacggtggccgtgattgtgggtgcctccgtcgggggcttcctggctgtggtcatcttggtgctgatggtggtcaagtgtgtgaggagaaaaaaagagcagaagctgagcacagatgacctgaagaccgaggaggagggcaagacggacggtgaaggcaacccggatgatggcgccaag

SEQ ID NO: 69 - DNA, 7653 bp, Artificial Sequence
  Polynucleotide encoding hNav1.4+P2A+hNavBeta1+P2A+hNavBeta2+P2A+hNavBeta3
atggccagacccagcctgtgcaccctggtgcccctgggccccgagtgcctgagacccttcaccagagagagcctggccgccatcgagcagagagccgtggaggaggaggccagactgcagagaaacaagcagatggagatcgaggagcccgagagaaagcccagaagcgacctggaggccggcaagaacctgcccatgatctacggcgaccccccccccgaggtgatcggcatccccctggaggacctggacccctactacagcaacaagaagaccttcatcgtgctgaacaagggcaaggccatcttcagattcagcgccacccccgccctgtacctgctgagccccttcagcgtggtgagaagaggcgccatcaaggtgctgatccacgccctgttcagcatgttcatcatgatcaccatcctgaccaactgcgtgttcatgaccatgagcgacccccccccctggagcaagaacgtggagtacaccttcaccggcatctacaccttcgagagcctgatcaagatcctggccagaggcttctgcgtggacgacttcaccttcctgagagacccctggaactggctggacttcagcgtgatcatgatggcctacctgaccgagttcgtggacctgggcaacatcagcgccctgagaaccttcagagtgctgagagccctgaagaccatcaccgtgatccccggcctgaagaccatcgtgggcgccctgatccagagcgtgaagaagctgagcgacgtgatgatcctgaccgtgttctgcctgagcgtgttcgccctggtgggcctgcagctgttcatgggcaacctgagacagaagtgcgtgagatggcccccccccttcaacgacaccaacaccacctggtacagcaacgacacctggtacggcaacgacacctggtacggcaacgagatgtggtacggcaacgacagctggtacgccaacgacacctggaacagccacgccagctgggccaccaacgacaccttcgactgggacgcctacatcagcgacgagggcaacttctacttcctggagggcagcaacgacgccctgctgtgcggcaacagcagcgacgccggccactgccccgagggctacgagtgcatcaagaccggcagaaaccccaactacggctacaccagctacgacaccttcagctgggccttcctggccctgttcagactgatgacccaggactactgggagaacctgttccagctgaccctgagagccgccggcaagacctacatgatcttcttcgtggtgatcatcttcctgggcagcttctacctgatcaacctgatcctggccgtggtggccatggcctacgccgagcagaacgaggccaccctggccgaggacaaggagaaggaggaggagttccagcagatgctggagaagttcaagaagcaccaggaggagctggagaaggccaaggccgcccaggccctggagggcggcgaggccgacggcgaccccgcccacggcaaggactgcaacggcagcctggacaccagccagggcgagaagggcgcccccagacagagcagcagcggcgacagcggcatcagcgacgccatggaggagctggaggaggcccaccagaagtgccccccctggtggtacaagtgcgcccacaaggtgctgatctggaactgctgcgccccctggctgaagttcaagaacatcatccacctgatcgtgatggaccccttcgtggacctgggcatcaccatctgcatcgtgctgaacaccctgttcatggccatggagcactaccccatgaccgagcacttcgacaacgtgctgaccgtgggcaacctggtgttcaccggcatcttcaccgccgagatggtgctgaagctgatcgccatggacccctacgagtacttccagcagggctggaacatcttcgacagcatcatcgtgaccctgagcctggtggagctgggcctggccaacgtgcagggcctgagcgtgctgagaagcttcagactgctgagagtgttcaagctggccaagagctggcccaccctgaacatgctgatcaagatcatcggcaacagcgtgggcgccctgggcaacctgaccctggtgctggccatcatcgtgttcatcttcgccgtggtgggcatgcagctgttcggcaagagctacaaggagtgcgtgtgcaagatcgccctggactgcaacctgcccagatggcacatgcacgacttcttccacagcttcctgatcgtgttcagaatcctgtgcggcgagtggatcgagaccatgtgggactgcatggaggtggccggccaggccatgtgcctgaccgtgttcctgatggtgatggtgatcggcaacctggtggtgctgaacctgttcctggccctgctgctgagcagcttcagcgccgacagcctggccgccagcgacgaggacggcgagatgaacaacctgcagatcgccatcggcagaatcaagctgggcatcggcttcgccaaggccttcctgctgggcctgctgcacggcaagatcctgagccccaaggacatcatgctgagcctgggcgaggccgacggcgccggcgaggccggcgaggccggcgagaccgcccccgaggacgagaagaaggagccccccgaggaggacctgaagaaggacaaccacatcctgaaccacatgggcctggccgacggcccccccagcagcctggagctggaccacctgaacttcatcaacaacccctacctgaccatccaggtgcccatcgccagcgaggagagcgacctggagatgcccaccgaggaggagaccgacaccttcagcgagcccgaggacagcaagaagcccccccagcccctgtacgacggcaacagcagcgtgtgcagcaccgccgactacaagccccccgaggaggaccccgaggagcaggccgaggagaaccccgagggcgagcagcccgaggagtgcttcaccgaggcctgcgtgcagagatggccctgcctgtacgtggacatcagccagggcagaggcaagaagtggtggaccctgagaagagcctgcttcaagatcgtggagcacaactggttcgagaccttcatcgtgttcatgatcctgctgagcagcggcgccctggccttcgaggacatctacatcgagcagagaagagtgatcagaaccatcctggagtacgccgacaaggtgttcacctacatcttcatcatggagatgctgctgaagtgggtggcctacggcttcaaggtgtacttcaccaacgcctggtgctggctggacttcctgatcgtggacgtgagcatcatcagcctggtggccaactggctgggctacagcgagctgggccccatcaagagcctgagaaccctgagagccctgagacccctgagagccctgagcagattcgagggcatgagagtggtggtgaacgccctgctgggcgccatccccagcatcatgaacgtgctgctggtgtgcctgatcttctggctgatcttcagcatcatgggcgtgaacctgttcgccggcaagttctactactgcatcaacaccaccaccagcgagagattcgacatcagcgaggtgaacaacaagagcgagtgcgagagcctgatgcacaccggccaggtgagatggctgaacgtgaaggtgaactacgacaacgtgggcctgggctacctgagcctgctgcaggtggccaccttcaagggctggatggacatcatgtacgccgccgtggacagcagagagaaggaggagcagccccagtacgaggtgaacctgtacatgtacctgtacttcgtgatcttcatcatcttcggcagcttcttcaccctgaacctgttcatcggcgtgatcatcgacaacttcaaccagcagaagaagaagctgggcggcaaggacatcttcatgaccgaggagcagaagaagtactacaacgccatgaagaagctgggcagcaagaagccccagaagcccatccccagaccccagaacaagatccagggcatggtgtacgacctggtgaccaagcaggccttcgacatcaccatcatgatcctgatctgcctgaacatggtgaccatgatggtggagaccgacaaccagagccagctgaaggtggacatcctgtacaacatcaacatgatcttcatcatcatcttcaccggcgagtgcgtgctgaagatgctggccctgagacagtactacttcaccgtgggctggaacatcttcgacttcgtggtggtgatcctgagcatcgtgggcctggccctgagcgacctgatccagaagtacttcgtgagccccaccctgttcagagtgatcagactggccagaatcggcagagtgctgagactgatcagaggcgccaagggcatcagaaccctgctgttcgccctgatgatgagcctgcccgccctgttcaacatcggcctgctgctgttcctggtgatgttcatctacagcatcttcggcatgagcaacttcgcctacgtgaagaaggagagcggcatcgacgacatgttcaacttcgagaccttcggcaacagcatcatctgcctgttcgagatcaccaccagcgccggctgggacggcctgctgaaccccatcctgaacagcggcccccccgactgcgaccccaacctggagaaccccggcaccagcgtgaagggcgactgcggcaaccccagcatcggcatctgcttcttctgcagctacatcatcatcagcttcctgatcgtggtgaacatgtacatcgccatcatcctggagaacttcaacgtggccaccgaggagagcagcgagcccctgggcgaggacgacttcgagatgttctacgagacctgggagaagttcgaccccgacgccacccagttcatcgcctacagcagactgagcgacttcgtggacaccctgcaggagcccctgagaatcgccaagcccaacaagatcaagctgatcaccctggacctgcccatggtgcccggcgacaagatccactgcctggacatcctgttcgccctgaccaaggaggtgctgggcgacagcggcgagatggacgccctgaagcagaccatggaggagaagttcatggccgccaaccccagcaaggtgagctacgagcccatcaccaccaccctgaagagaaagcacgaggaggtgtgcgccatcaagatccagagagcctacagaagacacctgctgcagagaagcatgaagcaggccagctacatgtacagacacagccacgacggcagcggcgacgacgcccccgagaaggagggcctgctggccaacaccatgagcaagatgtacggccacgagaacggcaacagcagcagccccagccccgaggagaagggcgaggccggcgacgccggccccaccatgggcctgatgcccatcagccccagcgacaccgcctggccccccgcccccccccccggccagaccgtgagacccggcgtgaaggagagcctggtgggaagcggagctactaacttcagcctgctgaagcaggctggagacgtggaggagaaccctggacctatggggaggctgctggccttagtggtcggcgcggcactggtgtcctcagcctgcgggggctgcgtggaggtggactcggagaccgaggccgtgtatgggatgaccttcaaaattctttgcatctcctgcaagcgccgcagcgagaccaacgctgagaccttcaccgagtggaccttccgccagaagggcactgaggagtttgtcaagatcctgcgctatgagaatgaggtgttgcagctggaggaggatgagcgcttcgagggccgcgtggtgtggaatggcagccggggcaccaaagacctgcaggatctgtctatcttcatcaccaatgtcacctacaaccactcgggcgactacgagtgccacgtctaccgcctgctcttcttcgaaaactacgagcacaacaccagcgtcgtcaagaagatccacattgaggtagtggacaaagccaacagagacatggcatccatcgtgtctgagatcatgatgtatgtgctcattgtggtgttgaccatatggctcgtggcagagatgatttactgctacaagaagatcgctgccgccacggagactgctgcacaggagaatgcctcggaatacctggccatcacctctgaaagcaaagagaactgcacgggcgtccaggtggccgaaggaagcggagctactaacttcagcctgctgaagcaggctggagacgtggaggagaaccctggacctatgcacagagatgcctggctacctcgccctgccttcagcctcacggggctcagtctctttttctctttggtgccaccaggacggagcatggaggtcacagtacctgccaccctcaacgtcctcaatggctctgacgcccgcctgccctgcaccttcaactcctgctacacagtgaaccacaaacagttctccctgaactggacttaccaggagtgcaacaactgctctgaggagatgttcctccagttccgcatgaagatcattaacctgaagctggagcggtttcaagaccgcgtggagttctcagggaaccccagcaagtacgatgtgtcggtgatgctgagaaacgtgcagccggaggatgaggggatttacaactgctacatcatgaacccccctgaccgccaccgtggccatggcaagatccatctgcaggtcctcatggaagagccccctgagcgggactccacggtggccgtgattgtgggtgcctccgtcgggggcttcctggctgtggtcatcttggtgctgatggtggtcaagtgtgtgaggagaaaaaaagagcagaagctgagcacagatgacctgaagaccgaggaggagggcaagacggacggtgaaggcaacccggatgatggcgccaagggaagcggagctactaacttcagcctgctgaagcaggctggagacgtggaggagaaccctggacctatgcctgccttcaatagattgtttcccctggcttctctcgtgcttatctactgggtcagtgtctgcttccctgtgtgtgtggaagtgccctcggagacggaggccgtgcagggcaaccccatgaagctgcgctgcatctcctgcatgaagagagaggaggtggaggccaccacggtggtggaatggttctacaggcccgagggcggtaaagatttccttatttacgagtatcggaatggccaccaggaggtggagagcccctttcaggggcgcctgcagtggaatggcagcaaggacctgcaggacgtgtccatcactgtgctcaacgtcactctgaacgactctggcctctacacctgcaatgtgtcccgggagtttgagtttgaggcgcatcggccctttgtgaagacgacgcggctgatccccctaagagtcaccgaggaggctggagaggacttcacctctgtggtctcagaaatcatgatgtacatccttctggtcttcctcaccttgtggctgctcatcgagatgatatattgctacagaaaggtctcaaaagccgaagaggcagcccaagaaaacgcgtctgactaccttgccatcccatctgagaacaaggagaactctgcggtaccagtggaggaatag

SEQ ID NO: 70 - DNA, 6669 bp, Artificial Sequence
  Polynucleotide encoding hNav1.5+P2A+hNavBeta1
atggccaacttcctgctgcccagaggcaccagcagcttcagaagattcaccagagagagcctggccgccatcgagaagagaatggccgagaagcaggccagaggcagcaccaccctgcaggagagcagagagggcctgcccgaggaggaggcccccagaccccagctggacctgcaggccagcaagaagctgcccgacctgtacggcaaccccccccaggagctgatcggcgagcccctggaggacctggaccccttctacagcacccagaagaccttcatcgtgctgaacaagggcaagaccatcttcagattcagcgccaccaacgccctgtacgtgctgagccccttccaccccatcagaagagccgccgtgaagatcctggtgcacagcctgttcaacatgctgatcatgtgcaccatcctgaccaactgcgtgttcatggcccagcacgacccccccccctggaccaagtacgtggagtacaccttcaccgccatctacaccttcgagagcctggtgaagatcctggccagaggcttctgcctgcacgccttcaccttcctgagagacccctggaactggctggacttcagcgtgatcatcatggcctacgtgagcgagaacatcaagctgggcaacctgagcgccctgagaaccttcagagtgctgagagccctgaagaccatcagcgtgatccccggcctgaagaccatcgtgggcgccctgatccagagcgtgaagaagctggccgacgtgatggtgctgaccgtgttctgcctgagcgtgttcgccctgatcggcctgcagctgttcatgggcaacctgagacacaagtgcgtgagaaacttcaccgccctgaacggcaccaacggcagcgtggaggccgacggcctggtgtgggagagcctggacctgtacctgagcgaccccgagaactacctgctgaagaacggcaccagcgacgtgctgctgtgcggcaacagcagcgacgccggcacctgccccgagggctacagatgcctgaaggccggcgagaaccccgaccacggctacaccagcttcgacagcttcgcctgggccttcctggccctgttcagactgatgacccaggactgctgggagagactgtaccagcagaccctgagaagcgccggcaagatctacatgatcttcttcatgctggtgatcttcctgggcagcttctacctggtgaacctgatcctggccgtggtggccatggcctacgaggagcagaaccaggccaccatcgccgagaccgaggagaaggagaagagattccaggaggccatggagatgctgaagaaggagcacgaggccctgaccatcagaggcgtggacaccgtgagcagaagcagcctggagatgagccccctggcccccgtgaacagccacgagagaagaagcaagagaagaaagagaatgagcagcggcaccgaggagtgcggcgaggacagactgcccaagagcgacagcgaggacggccccagagccatgaaccacctgagcctgaccagaggcctgagcagaaccagcatgaagcccagaagcagcagaggcagcatcttcaccttcagaagaagagacctgggcagcgaggccgacttcgccgacgacgagaacagcaccgccggcgagagcgagagccacagaaccagcctgctggtgccctggcccctgagaagaaccagcgcccagggccagcccagccccggcaccagcgcccccggccacgccctgcacggcaagaagaacagcaccgtggactgcaacggcgtggtgagcctgctgggcgccggcgaccccgaggccaccagccccggcagccacctgctgagacccgtgatgctggagcacccccccgacaccaccacccccagcgaggagcccggcggcccccagatgctgaccagccaggccccctgcgtggacggcttcgaggagcccggcgccagacagagagccctgagcgccgtgagcgtgctgaccagcgccctggaggagctggaggagagcagacacaagtgccccccctgctggaacagactggcccagagatacctgatctgggagtgctgccccctgtggatgagcatcaagcagggcgtgaagctggtggtgatggaccccttcaccgacctgaccatcaccatgtgcatcgtgctgaacaccctgttcatggccctggagcactacaacatgaccagcgagttcgaggagatgctgcaggtgggcaacctggtgttcaccggcatcttcaccgccgagatgaccttcaagatcatcgccctggacccctactactacttccagcagggctggaacatcttcgacagcatcatcgtgatcctgagcctgatggagctgggcctgagcagaatgagcaacctgagcgtgctgagaagcttcagactgctgagagtgttcaagctggccaagagctggcccaccctgaacaccctgatcaagatcatcggcaacagcgtgggcgccctgggcaacctgaccctggtgctggccatcatcgtgttcatcttcgccgtggtgggcatgcagctgttcggcaagaactacagcgagctgagagacagcgacagcggcctgctgcccagatggcacatgatggacttcttccacgccttcctgatcatcttcagaatcctgtgcggcgagtggatcgagaccatgtgggactgcatggaggtgagcggccagagcctgtgcctgctggtgttcctgctggtgatggtgatcggcaacctggtggtgctgaacctgttcctggccctgctgctgagcagcttcagcgccgacaacctgaccgcccccgacgaggacagagagatgaacaacctgcagctggccctggccagaatccagagaggcctgagattcgtgaagagaaccacctgggacttctgctgcggcctgctgagacagagaccccagaagcccgccgccctggccgcccagggccagctgcccagctgcatcgccaccccctacagcccccccccccccgagaccgagaaggtgccccccaccagaaaggagaccagattcgaggagggcgagcagcccggccagggcacccccggcgaccccgagcccgtgtgcgtgcccatcgccgtggccgagagcgacaccgacgaccaggaggaggacgaggagaacagcctgggcaccgaggaggagagcagcaagcaggagagccagcccgtgagcggcggccccgaggccccccccgacagcagaacctggagccaggtgagcgccaccgccagcagcgaggccgaggccagcgccagccaggccgactggagacagcagtggaaggccgagccccaggcccccggctgcggcgagacccccgaggacagctgcagcgagggcagcaccgccgacatgaccaacaccgccgagctgctggagcagatccccgacctgggccaggacgtgaaggaccccgaggactgcttcaccgagggctgcgtgagaagatgcccctgctgcgccgtggacaccacccaggcccccggcaaggtgtggtggagactgagaaagacctgctaccacatcgtggagcacagctggttcgagaccttcatcatcttcatgatcctgctgagcagcggcgccctggccttcgaggacatctacctggaggagagaaagaccatcaaggtgctgctggagtacgccgacaagatgttcacctacgtgttcgtgctggagatgctgctgaagtgggtggcctacggcttcaagaagtacttcaccaacgcctggtgctggctggacttcctgatcgtggacgtgagcctggtgagcctggtggccaacaccctgggcttcgccgagatgggccccatcaagagcctgagaaccctgagagccctgagacccctgagagccctgagcagattcgagggcatgagagtggtggtgaacgccctggtgggcgccatccccagcatcatgaacgtgctgctggtgtgcctgatcttctggctgatcttcagcatcatgggcgtgaacctgttcgccggcaagttcggcagatgcatcaaccagaccgagggcgacctgcccctgaactacaccatcgtgaacaacaagagccagtgcgagagcctgaacctgaccggcgagctgtactggaccaaggtgaaggtgaacttcgacaacgtgggcgccggctacctggccctgctgcaggtggccaccttcaagggctggatggacatcatgtacgccgccgtggacagcagaggctacgaggagcagccccagtgggagtacaacctgtacatgtacatctacttcgtgatcttcatcatcttcggcagcttcttcaccctgaacctgttcatcggcgtgatcatcgacaacttcaaccagcagaagaagaagctgggcggccaggacatcttcatgaccgaggagcagaagaagtactacaacgccatgaagaagctgggcagcaagaagccccagaagcccatccccagacccctgaacaagtaccagggcttcatcttcgacatcgtgaccaagcaggccttcgacgtgaccatcatgttcctgatctgcctgaacatggtgaccatgatggtggagaccgacgaccagagccccgagaagatcaacatcctggccaagatcaacctgctgttcgtggccatcttcaccggcaccgtgctgagcgacatcatccagaagtacttcttcagccccaccctgttcagagtgatcagactggccagaatcggcagaatcctgagactgatcagaggcgccaagggcatcagaaccctgctgttcgccctgatgatgagcctgcccgccctgttcaacatcggcctgctgctgttcctggtgatgttcatctacagcatcttcggcatggccaacttcgcctacgtgaagtgggaggccggcatcgacgacatgttcaacttccagaccttcgccaacagcatgctgtgcctgttccagatcaccaccagcgccggctgggacggcctgctgagccccatcctgaacaccggccccccctactgcgaccccaccctgcccaacagcaacggcagcagaggcgactgcggcagccccgccgtgggcatcctgttcttcaccacctacatcatcatcagcttcctgatcgtggtgaacatgtacatcgccatcatcctggagaacttcagcgtggccaccgaggagagcaccgagcccctgagcgaggacgacttcgacatgttctacgagatctgggagaagttcgaccccgaggccacccagttcatcgagtacagcgtgctgagcgacttcgccgacgccctgagcgagcccctgagaatcgccaagcccaaccagatcagcctgatcaacatggacctgcccatggtgagcggcgacagaatccactgcatggacatcctgttcgccttcaccaagagagtgctgggcgagagcggcgagatggacgccctgaagatccagatggaggagaagttcatggccgccaaccccagcaagatcagctacgagcccatcaccaccaccctgagaagaaagcacgaggaggtgagcgccatggtgatccagagagccttcagaagacacctgctgcagagaagcctgaagcacgccagcttcctgttcagacagcaggccggcagcggcctgagcgaggaggacgcccccgagagagagggcctgatcgcctacgtgatgagcgagaacttcagcagacccctgggcccccccagcagcagcagcatcagcagcaccagcttcccccccagctacgacagcgtgaccagagccaccagcgacaacctgcaggtgagaggcagcgactacagccacagcgaggacctggccgacttcccccccagccccgacagagacagagagagcatcgtgggaagcggagctactaacttcagcctgctgaagcaggctggagacgtggaggagaaccctggacctatggggaggctgctggccttagtggtcggcgcggcactggtgtcctcagcctgcgggggctgcgtggaggtggactcggagaccgaggccgtgtatgggatgaccttcaaaattctttgcatctcctgcaagcgccgcagcgagaccaacgctgagaccttcaccgagtggaccttccgccagaagggcactgaggagtttgtcaagatcctgcgctatgagaatgaggtgttgcagctggaggaggatgagcgcttcgagggccgcgtggtgtggaatggcagccggggcaccaaagacctgcaggatctgtctatcttcatcaccaatgtcacctacaaccactcgggcgactacgagtgccacgtctaccgcctgctcttcttcgaaaactacgagcacaacaccagcgtcgtcaagaagatccacattgaggtagtggacaaagccaacagagacatggcatccatcgtgtctgagatcatgatgtatgtgctcattgtggtgttgaccatatggctcgtggcagagatgatttactgctacaagaagatcgctgccgccacggagactgctgcacaggagaatgcctcggaatacctggccatcacctctgaaagcaaagagaactgcacgggcgtccaggtggccgaa

SEQ ID NO: 71 - DNA, 7380 bp, Artificial Sequence
  Polynucleotide encoding hNav1.5+P2A+P2A+hNavBeta1+P2A+hNavBeta2
atggccaacttcctgctgcccagaggcaccagcagcttcagaagattcaccagagagagcctggccgccatcgagaagagaatggccgagaagcaggccagaggcagcaccaccctgcaggagagcagagagggcctgcccgaggaggaggcccccagaccccagctggacctgcaggccagcaagaagctgcccgacctgtacggcaaccccccccaggagctgatcggcgagcccctggaggacctggaccccttctacagcacccagaagaccttcatcgtgctgaacaagggcaagaccatcttcagattcagcgccaccaacgccctgtacgtgctgagccccttccaccccatcagaagagccgccgtgaagatcctggtgcacagcctgttcaacatgctgatcatgtgcaccatcctgaccaactgcgtgttcatggcccagcacgacccccccccctggaccaagtacgtggagtacaccttcaccgccatctacaccttcgagagcctggtgaagatcctggccagaggcttctgcctgcacgccttcaccttcctgagagacccctggaactggctggacttcagcgtgatcatcatggcctacgtgagcgagaacatcaagctgggcaacctgagcgccctgagaaccttcagagtgctgagagccctgaagaccatcagcgtgatccccggcctgaagaccatcgtgggcgccctgatccagagcgtgaagaagctggccgacgtgatggtgctgaccgtgttctgcctgagcgtgttcgccctgatcggcctgcagctgttcatgggcaacctgagacacaagtgcgtgagaaacttcaccgccctgaacggcaccaacggcagcgtggaggccgacggcctggtgtgggagagcctggacctgtacctgagcgaccccgagaactacctgctgaagaacggcaccagcgacgtgctgctgtgcggcaacagcagcgacgccggcacctgccccgagggctacagatgcctgaaggccggcgagaaccccgaccacggctacaccagcttcgacagcttcgcctgggccttcctggccctgttcagactgatgacccaggactgctgggagagactgtaccagcagaccctgagaagcgccggcaagatctacatgatcttcttcatgctggtgatcttcctgggcagcttctacctggtgaacctgatcctggccgtggtggccatggcctacgaggagcagaaccaggccaccatcgccgagaccgaggagaaggagaagagattccaggaggccatggagatgctgaagaaggagcacgaggccctgaccatcagaggcgtggacaccgtgagcagaagcagcctggagatgagccccctggcccccgtgaacagccacgagagaagaagcaagagaagaaagagaatgagcagcggcaccgaggagtgcggcgaggacagactgcccaagagcgacagcgaggacggccccagagccatgaaccacctgagcctgaccagaggcctgagcagaaccagcatgaagcccagaagcagcagaggcagcatcttcaccttcagaagaagagacctgggcagcgaggccgacttcgccgacgacgagaacagcaccgccggcgagagcgagagccacagaaccagcctgctggtgccctggcccctgagaagaaccagcgcccagggccagcccagccccggcaccagcgcccccggccacgccctgcacggcaagaagaacagcaccgtggactgcaacggcgtggtgagcctgctgggcgccggcgaccccgaggccaccagccccggcagccacctgctgagacccgtgatgctggagcacccccccgacaccaccacccccagcgaggagcccggcggcccccagatgctgaccagccaggccccctgcgtggacggcttcgaggagcccggcgccagacagagagccctgagcgccgtgagcgtgctgaccagcgccctggaggagctggaggagagcagacacaagtgccccccctgctggaacagactggcccagagatacctgatctgggagtgctgccccctgtggatgagcatcaagcagggcgtgaagctggtggtgatggaccccttcaccgacctgaccatcaccatgtgcatcgtgctgaacaccctgttcatggccctggagcactacaacatgaccagcgagttcgaggagatgctgcaggtgggcaacctggtgttcaccggcatcttcaccgccgagatgaccttcaagatcatcgccctggacccctactactacttccagcagggctggaacatcttcgacagcatcatcgtgatcctgagcctgatggagctgggcctgagcagaatgagcaacctgagcgtgctgagaagcttcagactgctgagagtgttcaagctggccaagagctggcccaccctgaacaccctgatcaagatcatcggcaacagcgtgggcgccctgggcaacctgaccctggtgctggccatcatcgtgttcatcttcgccgtggtgggcatgcagctgttcggcaagaactacagcgagctgagagacagcgacagcggcctgctgcccagatggcacatgatggacttcttccacgccttcctgatcatcttcagaatcctgtgcggcgagtggatcgagaccatgtgggactgcatggaggtgagcggccagagcctgtgcctgctggtgttcctgctggtgatggtgatcggcaacctggtggtgctgaacctgttcctggccctgctgctgagcagcttcagcgccgacaacctgaccgcccccgacgaggacagagagatgaacaacctgcagctggccctggccagaatccagagaggcctgagattcgtgaagagaaccacctgggacttctgctgcggcctgctgagacagagaccccagaagcccgccgccctggccgcccagggccagctgcccagctgcatcgccaccccctacagcccccccccccccgagaccgagaaggtgccccccaccagaaaggagaccagattcgaggagggcgagcagcccggccagggcacccccggcgaccccgagcccgtgtgcgtgcccatcgccgtggccgagagcgacaccgacgaccaggaggaggacgaggagaacagcctgggcaccgaggaggagagcagcaagcaggagagccagcccgtgagcggcggccccgaggccccccccgacagcagaacctggagccaggtgagcgccaccgccagcagcgaggccgaggccagcgccagccaggccgactggagacagcagtggaaggccgagccccaggcccccggctgcggcgagacccccgaggacagctgcagcgagggcagcaccgccgacatgaccaacaccgccgagctgctggagcagatccccgacctgggccaggacgtgaaggaccccgaggactgcttcaccgagggctgcgtgagaagatgcccctgctgcgccgtggacaccacccaggcccccggcaaggtgtggtggagactgagaaagacctgctaccacatcgtggagcacagctggttcgagaccttcatcatcttcatgatcctgctgagcagcggcgccctggccttcgaggacatctacctggaggagagaaagaccatcaaggtgctgctggagtacgccgacaagatgttcacctacgtgttcgtgctggagatgctgctgaagtgggtggcctacggcttcaagaagtacttcaccaacgcctggtgctggctggacttcctgatcgtggacgtgagcctggtgagcctggtggccaacaccctgggcttcgccgagatgggccccatcaagagcctgagaaccctgagagccctgagacccctgagagccctgagcagattcgagggcatgagagtggtggtgaacgccctggtgggcgccatccccagcatcatgaacgtgctgctggtgtgcctgatcttctggctgatcttcagcatcatgggcgtgaacctgttcgccggcaagttcggcagatgcatcaaccagaccgagggcgacctgcccctgaactacaccatcgtgaacaacaagagccagtgcgagagcctgaacctgaccggcgagctgtactggaccaaggtgaaggtgaacttcgacaacgtgggcgccggctacctggccctgctgcaggtggccaccttcaagggctggatggacatcatgtacgccgccgtggacagcagaggctacgaggagcagccccagtgggagtacaacctgtacatgtacatctacttcgtgatcttcatcatcttcggcagcttcttcaccctgaacctgttcatcggcgtgatcatcgacaacttcaaccagcagaagaagaagctgggcggccaggacatcttcatgaccgaggagcagaagaagtactacaacgccatgaagaagctgggcagcaagaagccccagaagcccatccccagacccctgaacaagtaccagggcttcatcttcgacatcgtgaccaagcaggccttcgacgtgaccatcatgttcctgatctgcctgaacatggtgaccatgatggtggagaccgacgaccagagccccgagaagatcaacatcctggccaagatcaacctgctgttcgtggccatcttcaccggcaccgtgctgagcgacatcatccagaagtacttcttcagccccaccctgttcagagtgatcagactggccagaatcggcagaatcctgagactgatcagaggcgccaagggcatcagaaccctgctgttcgccctgatgatgagcctgcccgccctgttcaacatcggcctgctgctgttcctggtgatgttcatctacagcatcttcggcatggccaacttcgcctacgtgaagtgggaggccggcatcgacgacatgttcaacttccagaccttcgccaacagcatgctgtgcctgttccagatcaccaccagcgccggctgggacggcctgctgagccccatcctgaacaccggccccccctactgcgaccccaccctgcccaacagcaacggcagcagaggcgactgcggcagccccgccgtgggcatcctgttcttcaccacctacatcatcatcagcttcctgatcgtggtgaacatgtacatcgccatcatcctggagaacttcagcgtggccaccgaggagagcaccgagcccctgagcgaggacgacttcgacatgttctacgagatctgggagaagttcgaccccgaggccacccagttcatcgagtacagcgtgctgagcgacttcgccgacgccctgagcgagcccctgagaatcgccaagcccaaccagatcagcctgatcaacatggacctgcccatggtgagcggcgacagaatccactgcatggacatcctgttcgccttcaccaagagagtgctgggcgagagcggcgagatggacgccctgaagatccagatggaggagaagttcatggccgccaaccccagcaagatcagctacgagcccatcaccaccaccctgagaagaaagcacgaggaggtgagcgccatggtgatccagagagccttcagaagacacctgctgcagagaagcctgaagcacgccagcttcctgttcagacagcaggccggcagcggcctgagcgaggaggacgcccccgagagagagggcctgatcgcctacgtgatgagcgagaacttcagcagacccctgggcccccccagcagcagcagcatcagcagcaccagcttcccccccagctacgacagcgtgaccagagccaccagcgacaacctgcaggtgagaggcagcgactacagccacagcgaggacctggccgacttcccccccagccccgacagagacagagagagcatcgtgggaagcggagctactaacttcagcctgctgaagcaggctggagacgtggaggagaaccctggacctatggggaggctgctggccttagtggtcggcgcggcactggtgtcctcagcctgcgggggctgcgtggaggtggactcggagaccgaggccgtgtatgggatgaccttcaaaattctttgcatctcctgcaagcgccgcagcgagaccaacgctgagaccttcaccgagtggaccttccgccagaagggcactgaggagtttgtcaagatcctgcgctatgagaatgaggtgttgcagctggaggaggatgagcgcttcgagggccgcgtggtgtggaatggcagccggggcaccaaagacctgcaggatctgtctatcttcatcaccaatgtcacctacaaccactcgggcgactacgagtgccacgtctaccgcctgctcttcttcgaaaactacgagcacaacaccagcgtcgtcaagaagatccacattgaggtagtggacaaagccaacagagacatggcatccatcgtgtctgagatcatgatgtatgtgctcattgtggtgttgaccatatggctcgtggcagagatgatttactgctacaagaagatcgctgccgccacggagactgctgcacaggagaatgcctcggaatacctggccatcacctctgaaagcaaagagaactgcacgggcgtccaggtggccgaaggaagcggagctactaacttcagcctgctgaagcaggctggagacgtggaggagaaccctggacctatgcacagagatgcctggctacctcgccctgccttcagcctcacggggctcagtctctttttctctttggtgccaccaggacggagcatggaggtcacagtacctgccaccctcaacgtcctcaatggctctgacgcccgcctgccctgcaccttcaactcctgctacacagtgaaccacaaacagttctccctgaactggacttaccaggagtgcaacaactgctctgaggagatgttcctccagttccgcatgaagatcattaacctgaagctggagcggtttcaagaccgcgtggagttctcagggaaccccagcaagtacgatgtgtcggtgatgctgagaaacgtgcagccggaggatgaggggatttacaactgctacatcatgaacccccctgaccgccaccgtggccatggcaagatccatctgcaggtcctcatggaagagccccctgagcgggactccacggtggccgtgattgtgggtgcctccgtcgggggcttcctggctgtggtcatcttggtgctgatggtggtcaagtgtgtgaggagaaaaaaagagcagaagctgagcacagatgacctgaagaccgaggaggagggcaagacggacggtgaaggcaacccggatgatggcgccaag

SEQ ID NO: 72 - DNA, 8094 bp, Artificial Sequence
  Polynucleotide encoding hNav1.5+P2A+hNavBeta1+P2A+hNavBeta2+P2A+hNavBeta3
atggccaacttcctgctgcccagaggcaccagcagcttcagaagattcaccagagagagcctggccgccatcgagaagagaatggccgagaagcaggccagaggcagcaccaccctgcaggagagcagagagggcctgcccgaggaggaggcccccagaccccagctggacctgcaggccagcaagaagctgcccgacctgtacggcaaccccccccaggagctgatcggcgagcccctggaggacctggaccccttctacagcacccagaagaccttcatcgtgctgaacaagggcaagaccatcttcagattcagcgccaccaacgccctgtacgtgctgagccccttccaccccatcagaagagccgccgtgaagatcctggtgcacagcctgttcaacatgctgatcatgtgcaccatcctgaccaactgcgtgttcatggcccagcacgacccccccccctggaccaagtacgtggagtacaccttcaccgccatctacaccttcgagagcctggtgaagatcctggccagaggcttctgcctgcacgccttcaccttcctgagagacccctggaactggctggacttcagcgtgatcatcatggcctacgtgagcgagaacatcaagctgggcaacctgagcgccctgagaaccttcagagtgctgagagccctgaagaccatcagcgtgatccccggcctgaagaccatcgtgggcgccctgatccagagcgtgaagaagctggccgacgtgatggtgctgaccgtgttctgcctgagcgtgttcgccctgatcggcctgcagctgttcatgggcaacctgagacacaagtgcgtgagaaacttcaccgccctgaacggcaccaacggcagcgtggaggccgacggcctggtgtgggagagcctggacctgtacctgagcgaccccgagaactacctgctgaagaacggcaccagcgacgtgctgctgtgcggcaacagcagcgacgccggcacctgccccgagggctacagatgcctgaaggccggcgagaaccccgaccacggctacaccagcttcgacagcttcgcctgggccttcctggccctgttcagactgatgacccaggactgctgggagagactgtaccagcagaccctgagaagcgccggcaagatctacatgatcttcttcatgctggtgatcttcctgggcagcttctacctggtgaacctgatcctggccgtggtggccatggcctacgaggagcagaaccaggccaccatcgccgagaccgaggagaaggagaagagattccaggaggccatggagatgctgaagaaggagcacgaggccctgaccatcagaggcgtggacaccgtgagcagaagcagcctggagatgagccccctggcccccgtgaacagccacgagagaagaagcaagagaagaaagagaatgagcagcggcaccgaggagtgcggcgaggacagactgcccaagagcgacagcgaggacggccccagagccatgaaccacctgagcctgaccagaggcctgagcagaaccagcatgaagcccagaagcagcagaggcagcatcttcaccttcagaagaagagacctgggcagcgaggccgacttcgccgacgacgagaacagcaccgccggcgagagcgagagccacagaaccagcctgctggtgccctggcccctgagaagaaccagcgcccagggccagcccagccccggcaccagcgcccccggccacgccctgcacggcaagaagaacagcaccgtggactgcaacggcgtggtgagcctgctgggcgccggcgaccccgaggccaccagccccggcagccacctgctgagacccgtgatgctggagcacccccccgacaccaccacccccagcgaggagcccggcggcccccagatgctgaccagccaggccccctgcgtggacggcttcgaggagcccggcgccagacagagagccctgagcgccgtgagcgtgctgaccagcgccctggaggagctggaggagagcagacacaagtgccccccctgctggaacagactggcccagagatacctgatctgggagtgctgccccctgtggatgagcatcaagcagggcgtgaagctggtggtgatggaccccttcaccgacctgaccatcaccatgtgcatcgtgctgaacaccctgttcatggccctggagcactacaacatgaccagcgagttcgaggagatgctgcaggtgggcaacctggtgttcaccggcatcttcaccgccgagatgaccttcaagatcatcgccctggacccctactactacttccagcagggctggaacatcttcgacagcatcatcgtgatcctgagcctgatggagctgggcctgagcagaatgagcaacctgagcgtgctgagaagcttcagactgctgagagtgttcaagctggccaagagctggcccaccctgaacaccctgatcaagatcatcggcaacagcgtgggcgccctgggcaacctgaccctggtgctggccatcatcgtgttcatcttcgccgtggtgggcatgcagctgttcggcaagaactacagcgagctgagagacagcgacagcggcctgctgcccagatggcacatgatggacttcttccacgccttcctgatcatcttcagaatcctgtgcggcgagtggatcgagaccatgtgggactgcatggaggtgagcggccagagcctgtgcctgctggtgttcctgctggtgatggtgatcggcaacctggtggtgctgaacctgttcctggccctgctgctgagcagcttcagcgccgacaacctgaccgcccccgacgaggacagagagatgaacaacctgcagctggccctggccagaatccagagaggcctgagattcgtgaagagaaccacctgggacttctgctgcggcctgctgagacagagaccccagaagcccgccgccctggccgcccagggccagctgcccagctgcatcgccaccccctacagcccccccccccccgagaccgagaaggtgccccccaccagaaaggagaccagattcgaggagggcgagcagcccggccagggcacccccggcgaccccgagcccgtgtgcgtgcccatcgccgtggccgagagcgacaccgacgaccaggaggaggacgaggagaacagcctgggcaccgaggaggagagcagcaagcaggagagccagcccgtgagcggcggccccgaggccccccccgacagcagaacctggagccaggtgagcgccaccgccagcagcgaggccgaggccagcgccagccaggccgactggagacagcagtggaaggccgagccccaggcccccggctgcggcgagacccccgaggacagctgcagcgagggcagcaccgccgacatgaccaacaccgccgagctgctggagcagatccccgacctgggccaggacgtgaaggaccccgaggactgcttcaccgagggctgcgtgagaagatgcccctgctgcgccgtggacaccacccaggcccccggcaaggtgtggtggagactgagaaagacctgctaccacatcgtggagcacagctggttcgagaccttcatcatcttcatgatcctgctgagcagcggcgccctggccttcgaggacatctacctggaggagagaaagaccatcaaggtgctgctggagtacgccgacaagatgttcacctacgtgttcgtgctggagatgctgctgaagtgggtggcctacggcttcaagaagtacttcaccaacgcctggtgctggctggacttcctgatcgtggacgtgagcctggtgagcctggtggccaacaccctgggcttcgccgagatgggccccatcaagagcctgagaaccctgagagccctgagacccctgagagccctgagcagattcgagggcatgagagtggtggtgaacgccctggtgggcgccatccccagcatcatgaacgtgctgctggtgtgcctgatcttctggctgatcttcagcatcatgggcgtgaacctgttcgccggcaagttcggcagatgcatcaaccagaccgagggcgacctgcccctgaactacaccatcgtgaacaacaagagccagtgcgagagcctgaacctgaccggcgagctgtactggaccaaggtgaaggtgaacttcgacaacgtgggcgccggctacctggccctgctgcaggtggccaccttcaagggctggatggacatcatgtacgccgccgtggacagcagaggctacgaggagcagccccagtgggagtacaacctgtacatgtacatctacttcgtgatcttcatcatcttcggcagcttcttcaccctgaacctgttcatcggcgtgatcatcgacaacttcaaccagcagaagaagaagctgggcggccaggacatcttcatgaccgaggagcagaagaagtactacaacgccatgaagaagctgggcagcaagaagccccagaagcccatccccagacccctgaacaagtaccagggcttcatcttcgacatcgtgaccaagcaggccttcgacgtgaccatcatgttcctgatctgcctgaacatggtgaccatgatggtggagaccgacgaccagagccccgagaagatcaacatcctggccaagatcaacctgctgttcgtggccatcttcaccggcaccgtgctgagcgacatcatccagaagtacttcttcagccccaccctgttcagagtgatcagactggccagaatcggcagaatcctgagactgatcagaggcgccaagggcatcagaaccctgctgttcgccctgatgatgagcctgcccgccctgttcaacatcggcctgctgctgttcctggtgatgttcatctacagcatcttcggcatggccaacttcgcctacgtgaagtgggaggccggcatcgacgacatgttcaacttccagaccttcgccaacagcatgctgtgcctgttccagatcaccaccagcgccggctgggacggcctgctgagccccatcctgaacaccggccccccctactgcgaccccaccctgcccaacagcaacggcagcagaggcgactgcggcagccccgccgtgggcatcctgttcttcaccacctacatcatcatcagcttcctgatcgtggtgaacatgtacatcgccatcatcctggagaacttcagcgtggccaccgaggagagcaccgagcccctgagcgaggacgacttcgacatgttctacgagatctgggagaagttcgaccccgaggccacccagttcatcgagtacagcgtgctgagcgacttcgccgacgccctgagcgagcccctgagaatcgccaagcccaaccagatcagcctgatcaacatggacctgcccatggtgagcggcgacagaatccactgcatggacatcctgttcgccttcaccaagagagtgctgggcgagagcggcgagatggacgccctgaagatccagatggaggagaagttcatggccgccaaccccagcaagatcagctacgagcccatcaccaccaccctgagaagaaagcacgaggaggtgagcgccatggtgatccagagagccttcagaagacacctgctgcagagaagcctgaagcacgccagcttcctgttcagacagcaggccggcagcggcctgagcgaggaggacgcccccgagagagagggcctgatcgcctacgtgatgagcgagaacttcagcagacccctgggcccccccagcagcagcagcatcagcagcaccagcttcccccccagctacgacagcgtgaccagagccaccagcgacaacctgcaggtgagaggcagcgactacagccacagcgaggacctggccgacttcccccccagccccgacagagacagagagagcatcgtgggaagcggagctactaacttcagcctgctgaagcaggctggagacgtggaggagaaccctggacctatggggaggctgctggccttagtggtcggcgcggcactggtgtcctcagcctgcgggggctgcgtggaggtggactcggagaccgaggccgtgtatgggatgaccttcaaaattctttgcatctcctgcaagcgccgcagcgagaccaacgctgagaccttcaccgagtggaccttccgccagaagggcactgaggagtttgtcaagatcctgcgctatgagaatgaggtgttgcagctggaggaggatgagcgcttcgagggccgcgtggtgtggaatggcagccggggcaccaaagacctgcaggatctgtctatcttcatcaccaatgtcacctacaaccactcgggcgactacgagtgccacgtctaccgcctgctcttcttcgaaaactacgagcacaacaccagcgtcgtcaagaagatccacattgaggtagtggacaaagccaacagagacatggcatccatcgtgtctgagatcatgatgtatgtgctcattgtggtgttgaccatatggctcgtggcagagatgatttactgctacaagaagatcgctgccgccacggagactgctgcacaggagaatgcctcggaatacctggccatcacctctgaaagcaaagagaactgcacgggcgtccaggtggccgaaggaagcggagctactaacttcagcctgctgaagcaggctggagacgtggaggagaaccctggacctatgcacagagatgcctggctacctcgccctgccttcagcctcacggggctcagtctctttttctctttggtgccaccaggacggagcatggaggtcacagtacctgccaccctcaacgtcctcaatggctctgacgcccgcctgccctgcaccttcaactcctgctacacagtgaaccacaaacagttctccctgaactggacttaccaggagtgcaacaactgctctgaggagatgttcctccagttccgcatgaagatcattaacctgaagctggagcggtttcaagaccgcgtggagttctcagggaaccccagcaagtacgatgtgtcggtgatgctgagaaacgtgcagccggaggatgaggggatttacaactgctacatcatgaacccccctgaccgccaccgtggccatggcaagatccatctgcaggtcctcatggaagagccccctgagcgggactccacggtggccgtgattgtgggtgcctccgtcgggggcttcctggctgtggtcatcttggtgctgatggtggtcaagtgtgtgaggagaaaaaaagagcagaagctgagcacagatgacctgaagaccgaggaggagggcaagacggacggtgaaggcaacccggatgatggcgccaagggaagcggagctactaacttcagcctgctgaagcaggctggagacgtggaggagaaccctggacctatgcctgccttcaatagattgtttcccctggcttctctcgtgcttatctactgggtcagtgtctgcttccctgtgtgtgtggaagtgccctcggagacggaggccgtgcagggcaaccccatgaagctgcgctgcatctcctgcatgaagagagaggaggtggaggccaccacggtggtggaatggttctacaggcccgagggcggtaaagatttccttatttacgagtatcggaatggccaccaggaggtggagagcccctttcaggggcgcctgcagtggaatggcagcaaggacctgcaggacgtgtccatcactgtgctcaacgtcactctgaacgactctggcctctacacctgcaatgtgtcccgggagtttgagtttgaggcgcatcggccctttgtgaagacgacgcggctgatccccctaagagtcaccgaggaggctggagaggacttcacctctgtggtctcagaaatcatgatgtacatccttctggtcttcctcaccttgtggctgctcatcgagatgatatattgctacagaaaggtctcaaaagccgaagaggcagcccaagaaaacgcgtctgactaccttgccatcccatctgagaacaaggagaactctgcggtaccagtggaggaatag

SEQ ID NO: 73 - DNA, 6663 bp, Artificial Sequence
  Polynucleotide encoding hNav1.6+P2A+hBeta1
atggcagcgcggctgcttgcaccaccaggccctgatagtttcaagcctttcacccctgagtcactggcaaacattgagaggcgcattgctgagagcaagctcaagaaaccaccaaaggccgatggcagtcatcgggaggacgatgaggacagcaagcccaagccaaacagcgacctggaagcagggaagagtttgcctttcatctacggggacatcccccaaggcctggttgcagttcccctggaggactttgacccatactatttgacgcagaaaacctttgtagtattaaacagagggaaaactctcttcagatttagtgccacgcctgccttgtacattttaagtccttttaacctgataagaagaatagctattaaaattttgatacattcagtatttagcatgatcattatgtgcactattttgaccaactgtgtattcatgacttttagtaaccctcctgactggtcgaagaatgtggagtacacgttcacagggatttatacatttgaatcactagtgaaaatcattgcaagaggtttctgcatagatggctttacctttttacgggacccatggaactggttagatttcagtgtcatcatgatggcgtatataacagagtttgtaaacctaggcaatgtttcagctctacgcactttcagggtactgagggctttgaaaactatttcggtaatcccaggcctgaagacaattgtgggtgccctgattcagtctgtgaagaaactgtcagatgtgatgatcctgacagtgttctgcctgagtgtttttgccttgatcggactgcagctgttcatggggaaccttcgaaacaagtgtgttgtgtggcccataaacttcaacgagagctatcttgaaaatggcaccaaaggctttgattgggaagagtatatcaacaataaaacaaatttctacacagttcctggcatgctggaacctttactctgtgggaacagttctgatgctgggcaatgcccagagggataccagtgtatgaaagcaggaaggaaccccaactatggttacacaagttttgacacttttagctgggccttcttggcattatttcgccttatgacccaggactattgggaaaacttgtatcaattgactttacgagcagccgggaaaacatacatgatcttcttcgtcttggtcatctttgtgggttctttctatctggtgaacttgatcttggctgtggtggccatggcttatgaagaacagaatcaggcaacactggaggaggcagaacaaaaagaggctgaatttaaagcaatgttggagcaacttaagaagcaacaggaagaggcacaggctgctgcgatggccacttcagcaggaactgtctcagaagatgccatagaggaagaaggtgaagaaggagggggctcccctcggagctcttctgaaatctctaaactcagctcaaagagtgcaaaggaaagacgtaacaggagaaagaagaggaagcaaaaggaactctctgaaggagaggagaaaggggatcccgagaaggtgtttaagtcagagtcagaagatggcatgagaaggaaggcctttcggctgccagacaacagaatagggaggaaattttccatcatgaatcagtcactgctcagcatcccaggctcgcccttcctctcccgccacaacagcaagagcagcatcttcagtttcaggggacctgggcggttccgagacccgggctccgagaatgagttcgcggatgacgagcacagcacggtggaggagagcgagggccgccgggactccctcttcatccccatccgggcccgcgagcgccggagcagctacagcggctacagcggctacagccagggcagccgctcctcgcgcatcttccccagcctgcggcgcagcgtgaagcgcaacagcacggtggactgcaacggcgtggtgtccctcatcggcggccccggctcccacatcggcgggcgtctcctgccagaggctacaactgaggtggaaattaagaagaaaggccctggatctcttttagtttccatggaccaattagcctcctacgggcggaaggacagaatcaacagtataatgagtgttgttacaaatacactagtagaagaactggaagagtctcagagaaagtgcccgccatgctggtataaatttgccaacactttcctcatctgggagtgccacccctactggataaaactgaaagagattgtgaacttgatagttatggacccttttgtggatttagccatcaccatctgcatcgtcctgaatacactgtttatggcaatggagcaccatcctatgacaccacaatttgaacatgtcttggctgtaggaaatctggttttcactggaattttcacagcggaaatgttcctgaagctcatagccatggatccctactattatttccaagaaggttggaacatttttgacggatttattgtctccctcagtttaatggaactgagtctagcagacgtggaggggctttcagtgctgcgatctttccgattgctccgagtcttcaaattggccaaatcctggcccaccctgaacatgctaatcaagattattggaaattcagtgggtgccctgggcaacctgacactggtgctggccattattgtcttcatctttgccgtggtggggatgcaactctttggaaaaagctacaaagagtgtgtctgcaagatcaaccaggactgtgaactccctcgctggcatatgcatgactttttccattccttcctcattgtctttcgagtgttgtgcggggagtggattgagaccatgtgggactgcatggaagtggcaggccaggccatgtgcctcattgtctttatgatggtcatggtgattggcaacttggtggtgctgaacctgtttctggccttgctcctgagctccttcagtgcagacaacctggctgccacagatgacgatggggaaatgaacaacctccagatctcagtgatccgtatcaagaagggtgtggcctggaccaaactaaaggtgcacgccttcatgcaggcccactttaagcagcgtgaggctgatgaggtgaagcctctggatgagttgtatgaaaagaaggccaactgtatcgccaatcacaccggtgcagacatccaccggaatggtgacttccagaagaatggcaatggcacaaccagcggcattggcagcagcgtggagaagtacatcattgatgaggaccacatgtccttcatcaacaaccccaacttgactgtacgggtacccattgctgtgggcgagtctgactttgagaacctcaacacagaggatgttagcagcgagtcggatcctgaaggcagcaaagataaactagatgacaccagctcctctgaaggaagcaccattgatatcaaaccagaagtagaagaggtccctgtggaacagcctgaggaatacttggatccagatgcctgcttcacagaaggttgtgtccagcggttcaagtgctgccaggtcaacatcgaggaagggctaggcaagtcttggtggatcctgcggaaaacctgcttcctcatcgtggagcacaactggtttgagaccttcatcatcttcatgattctgctgagcagtggcgccctggccttcgaggacatctacattgagcagagaaagaccatccgcaccatcctggaatatgctgacaaagtcttcacctatatcttcatcctggagatgttgctcaagtggacagcctatggcttcgtcaagttcttcaccaatgcctggtgttggctggacttcctcattgtggctgtctctttagtcagccttatagctaatgccctgggctactcggaactaggtgccataaagtcccttaggaccctaagagctttgagacccttaagagccttatcacgatttgaagggatgagggtggtggtgaatgccttggtgggcgccatcccctccatcatgaatgtgctgctggtgtgtctcatcttctggctgattttcagcatcatgggagttaacttgtttgcgggaaagtaccactactgctttaatgagacttctgaaatccgatttgaaattgaagatgtcaacaataaaactgaatgtgaaaagcttatggaggggaacaatacagagatcagatggaagaacgtgaagatcaactttgacaatgttggggcaggatacctggcccttcttcaagtagcaaccttcaaaggctggatggacatcatgtatgcagctgtagattcccggaagcctgatgagcagcctaagtatgaggacaatatctacatgtacatctattttgtcatcttcatcatcttcggctccttcttcaccctgaacctgttcattggtgtcatcattgataacttcaatcaacaaaagaaaaagttcggaggtcaggacatcttcatgaccgaagaacagaagaagtactacaatgccatgaaaaagctgggctcaaagaagccacagaaacctattccccgccccttgaacaaaatccaaggaatcgtctttgattttgtcactcagcaagcctttgacattgttatcatgatgctcatctgccttaacatggtgacaatgatggtggagacagacactcaaagcaagcagatggagaacatcctctactggattaacctggtgtttgttatcttcttcacctgtgagtgtgtgctcaaaatgtttgcgttgaggcactactacttcaccattggctggaacatcttcgacttcgtggtagtcatcctctccattgtgggaatgttcctggcagatataattgagaaatactttgtttccccaaccctattccgagtcatccgattggcccgtattgggcgcatcttgcgtctgatcaaaggcgccaaagggattcgtaccctgctctttgccttaatgatgtccttgcctgccctgttcaacatcggccttctgctcttcctggtcatgttcatcttctccatttttgggatgtccaattttgcatatgtgaagcacgaggctggtatcgatgacatgttcaactttgagacatttggcaacagcatgatctgcctgtttcaaatcacaacctcagctggttgggatggcctgctgctgcccatcctaaaccgcccccctgactgcagcctagataaggaacacccagggagtggctttaagggagattgtgggaacccctcagtgggcatcttcttctttgtaagctacatcatcatctctttcctaattgtcgtgaacatgtacattgccatcatcctggagaacttcagtgtagccacagaggaaagtgcagaccctctgagtgaggatgactttgagaccttctatgagatctgggagaagttcgaccccgatgccacccagttcattgagtactgtaagctggcagactttgcagatgccttggagcatcctctccgagtgcccaagcccaataccattgagctcatcgctatggatctgccaatggtgagcggggatcgcatccactgcttggacatcctttttgccttcaccaagcgggtcctgggagatagcggggagttggacatcctgcggcagcagatggaagagcggttcgtggcatccaatccttccaaagtgtcttacgagccaatcacaaccacactgcgtcgcaagcaggaggaggtatctgcagtggtcctgcagcgtgcctaccggggacatttggcaaggcggggcttcatctgcaaaaagacaacttctaataagctggagaatggaggcacacaccgggagaaaaaagagagcaccccatctacagcctccctcccgtcctatgacagtgtaactaaacctgaaaaggagaaacagcagcgggcagaggaaggaagaagggaaagagccaaaagacaaaaagaggtcagagaatccaagtgttagggaagcggagctactaacttcagcctgctgaagcaggctggagacgtggaggagaaccctggacctatggggaggctgctggccttagtggtcggcgcggcactggtgtcctcagcctgcgggggctgcgtggaggtggactcggagaccgaggccgtgtatgggatgaccttcaaaattctttgcatctcctgcaagcgccgcagcgagaccaacgctgagaccttcaccgagtggaccttccgccagaagggcactgaggagtttgtcaagatcctgcgctatgagaatgaggtgttgcagctggaggaggatgagcgcttcgagggccgcgtggtgtggaatggcagccggggcaccaaagacctgcaggatctgtctatcttcatcaccaatgtcacctacaaccactcgggcgactacgagtgccacgtctaccgcctgctcttcttcgaaaactacgagcacaacaccagcgtcgtcaagaagatccacattgaggtagtggacaaagccaacagagacatggcatccatcgtgtctgagatcatgatgtatgtgctcattgtggtgttgaccatatggctcgtggcagagatgatttactgctacaagaagatcgctgccgccacggagactgctgcacaggagaatgcctcggaatacctggccatcacctctgaaagcaaagagaactgcacgggcgtccaggtggccgaa

SEQ ID NO: 74 - DNA, 7374 bp, Artificial Sequence
  Polynucleotide encoding hNav1.6+P2A+hNavBeta1+P2A+hNavBeta2
atggcagcgcggctgcttgcaccaccaggccctgatagtttcaagcctttcacccctgagtcactggcaaacattgagaggcgcattgctgagagcaagctcaagaaaccaccaaaggccgatggcagtcatcgggaggacgatgaggacagcaagcccaagccaaacagcgacctggaagcagggaagagtttgcctttcatctacggggacatcccccaaggcctggttgcagttcccctggaggactttgacccatactatttgacgcagaaaacctttgtagtattaaacagagggaaaactctcttcagatttagtgccacgcctgccttgtacattttaagtccttttaacctgataagaagaatagctattaaaattttgatacattcagtatttagcatgatcattatgtgcactattttgaccaactgtgtattcatgacttttagtaaccctcctgactggtcgaagaatgtggagtacacgttcacagggatttatacatttgaatcactagtgaaaatcattgcaagaggtttctgcatagatggctttacctttttacgggacccatggaactggttagatttcagtgtcatcatgatggcgtatataacagagtttgtaaacctaggcaatgtttcagctctacgcactttcagggtactgagggctttgaaaactatttcggtaatcccaggcctgaagacaattgtgggtgccctgattcagtctgtgaagaaactgtcagatgtgatgatcctgacagtgttctgcctgagtgtttttgccttgatcggactgcagctgttcatggggaaccttcgaaacaagtgtgttgtgtggcccataaacttcaacgagagctatcttgaaaatggcaccaaaggctttgattgggaagagtatatcaacaataaaacaaatttctacacagttcctggcatgctggaacctttactctgtgggaacagttctgatgctgggcaatgcccagagggataccagtgtatgaaagcaggaaggaaccccaactatggttacacaagttttgacacttttagctgggccttcttggcattatttcgccttatgacccaggactattgggaaaacttgtatcaattgactttacgagcagccgggaaaacatacatgatcttcttcgtcttggtcatctttgtgggttctttctatctggtgaacttgatcttggctgtggtggccatggcttatgaagaacagaatcaggcaacactggaggaggcagaacaaaaagaggctgaatttaaagcaatgttggagcaacttaagaagcaacaggaagaggcacaggctgctgcgatggccacttcagcaggaactgtctcagaagatgccatagaggaagaaggtgaagaaggagggggctcccctcggagctcttctgaaatctctaaactcagctcaaagagtgcaaaggaaagacgtaacaggagaaagaagaggaagcaaaaggaactctctgaaggagaggagaaaggggatcccgagaaggtgtttaagtcagagtcagaagatggcatgagaaggaaggcctttcggctgccagacaacagaatagggaggaaattttccatcatgaatcagtcactgctcagcatcccaggctcgcccttcctctcccgccacaacagcaagagcagcatcttcagtttcaggggacctgggcggttccgagacccgggctccgagaatgagttcgcggatgacgagcacagcacggtggaggagagcgagggccgccgggactccctcttcatccccatccgggcccgcgagcgccggagcagctacagcggctacagcggctacagccagggcagccgctcctcgcgcatcttccccagcctgcggcgcagcgtgaagcgcaacagcacggtggactgcaacggcgtggtgtccctcatcggcggccccggctcccacatcggcgggcgtctcctgccagaggctacaactgaggtggaaattaagaagaaaggccctggatctcttttagtttccatggaccaattagcctcctacgggcggaaggacagaatcaacagtataatgagtgttgttacaaatacactagtagaagaactggaagagtctcagagaaagtgcccgccatgctggtataaatttgccaacactttcctcatctgggagtgccacccctactggataaaactgaaagagattgtgaacttgatagttatggacccttttgtggatttagccatcaccatctgcatcgtcctgaatacactgtttatggcaatggagcaccatcctatgacaccacaatttgaacatgtcttggctgtaggaaatctggttttcactggaattttcacagcggaaatgttcctgaagctcatagccatggatccctactattatttccaagaaggttggaacatttttgacggatttattgtctccctcagtttaatggaactgagtctagcagacgtggaggggctttcagtgctgcgatctttccgattgctccgagtcttcaaattggccaaatcctggcccaccctgaacatgctaatcaagattattggaaattcagtgggtgccctgggcaacctgacactggtgctggccattattgtcttcatctttgccgtggtggggatgcaactctttggaaaaagctacaaagagtgtgtctgcaagatcaaccaggactgtgaactccctcgctggcatatgcatgactttttccattccttcctcattgtctttcgagtgttgtgcggggagtggattgagaccatgtgggactgcatggaagtggcaggccaggccatgtgcctcattgtctttatgatggtcatggtgattggcaacttggtggtgctgaacctgtttctggccttgctcctgagctccttcagtgcagacaacctggctgccacagatgacgatggggaaatgaacaacctccagatctcagtgatccgtatcaagaagggtgtggcctggaccaaactaaaggtgcacgccttcatgcaggcccactttaagcagcgtgaggctgatgaggtgaagcctctggatgagttgtatgaaaagaaggccaactgtatcgccaatcacaccggtgcagacatccaccggaatggtgacttccagaagaatggcaatggcacaaccagcggcattggcagcagcgtggagaagtacatcattgatgaggaccacatgtccttcatcaacaaccccaacttgactgtacgggtacccattgctgtgggcgagtctgactttgagaacctcaacacagaggatgttagcagcgagtcggatcctgaaggcagcaaagataaactagatgacaccagctcctctgaaggaagcaccattgatatcaaaccagaagtagaagaggtccctgtggaacagcctgaggaatacttggatccagatgcctgcttcacagaaggttgtgtccagcggttcaagtgctgccaggtcaacatcgaggaagggctaggcaagtcttggtggatcctgcggaaaacctgcttcctcatcgtggagcacaactggtttgagaccttcatcatcttcatgattctgctgagcagtggcgccctggccttcgaggacatctacattgagcagagaaagaccatccgcaccatcctggaatatgctgacaaagtcttcacctatatcttcatcctggagatgttgctcaagtggacagcctatggcttcgtcaagttcttcaccaatgcctggtgttggctggacttcctcattgtggctgtctctttagtcagccttatagctaatgccctgggctactcggaactaggtgccataaagtcccttaggaccctaagagctttgagacccttaagagccttatcacgatttgaagggatgagggtggtggtgaatgccttggtgggcgccatcccctccatcatgaatgtgctgctggtgtgtctcatcttctggctgattttcagcatcatgggagttaacttgtttgcgggaaagtaccactactgctttaatgagacttctgaaatccgatttgaaattgaagatgtcaacaataaaactgaatgtgaaaagcttatggaggggaacaatacagagatcagatggaagaacgtgaagatcaactttgacaatgttggggcaggatacctggcccttcttcaagtagcaaccttcaaaggctggatggacatcatgtatgcagctgtagattcccggaagcctgatgagcagcctaagtatgaggacaatatctacatgtacatctattttgtcatcttcatcatcttcggctccttcttcaccctgaacctgttcattggtgtcatcattgataacttcaatcaacaaaagaaaaagttcggaggtcaggacatcttcatgaccgaagaacagaagaagtactacaatgccatgaaaaagctgggctcaaagaagccacagaaacctattccccgccccttgaacaaaatccaaggaatcgtctttgattttgtcactcagcaagcctttgacattgttatcatgatgctcatctgccttaacatggtgacaatgatggtggagacagacactcaaagcaagcagatggagaacatcctctactggattaacctggtgtttgttatcttcttcacctgtgagtgtgtgctcaaaatgtttgcgttgaggcactactacttcaccattggctggaacatcttcgacttcgtggtagtcatcctctccattgtgggaatgttcctggcagatataattgagaaatactttgtttccccaaccctattccgagtcatccgattggcccgtattgggcgcatcttgcgtctgatcaaaggcgccaaagggattcgtaccctgctctttgccttaatgatgtccttgcctgccctgttcaacatcggccttctgctcttcctggtcatgttcatcttctccatttttgggatgtccaattttgcatatgtgaagcacgaggctggtatcgatgacatgttcaactttgagacatttggcaacagcatgatctgcctgtttcaaatcacaacctcagctggttgggatggcctgctgctgcccatcctaaaccgcccccctgactgcagcctagataaggaacacccagggagtggctttaagggagattgtgggaacccctcagtgggcatcttcttctttgtaagctacatcatcatctctttcctaattgtcgtgaacatgtacattgccatcatcctggagaacttcagtgtagccacagaggaaagtgcagaccctctgagtgaggatgactttgagaccttctatgagatctgggagaagttcgaccccgatgccacccagttcattgagtactgtaagctggcagactttgcagatgccttggagcatcctctccgagtgcccaagcccaataccattgagctcatcgctatggatctgccaatggtgagcggggatcgcatccactgcttggacatcctttttgccttcaccaagcgggtcctgggagatagcggggagttggacatcctgcggcagcagatggaagagcggttcgtggcatccaatccttccaaagtgtcttacgagccaatcacaaccacactgcgtcgcaagcaggaggaggtatctgcagtggtcctgcagcgtgcctaccggggacatttggcaaggcggggcttcatctgcaaaaagacaacttctaataagctggagaatggaggcacacaccgggagaaaaaagagagcaccccatctacagcctccctcccgtcctatgacagtgtaactaaacctgaaaaggagaaacagcagcgggcagaggaaggaagaagggaaagagccaaaagacaaaaagaggtcagagaatccaagtgttagggaagcggagctactaacttcagcctgctgaagcaggctggagacgtggaggagaaccctggacctatggggaggctgctggccttagtggtcggcgcggcactggtgtcctcagcctgcgggggctgcgtggaggtggactcggagaccgaggccgtgtatgggatgaccttcaaaattctttgcatctcctgcaagcgccgcagcgagaccaacgctgagaccttcaccgagtggaccttccgccagaagggcactgaggagtttgtcaagatcctgcgctatgagaatgaggtgttgcagctggaggaggatgagcgcttcgagggccgcgtggtgtggaatggcagccggggcaccaaagacctgcaggatctgtctatcttcatcaccaatgtcacctacaaccactcgggcgactacgagtgccacgtctaccgcctgctcttcttcgaaaactacgagcacaacaccagcgtcgtcaagaagatccacattgaggtagtggacaaagccaacagagacatggcatccatcgtgtctgagatcatgatgtatgtgctcattgtggtgttgaccatatggctcgtggcagagatgatttactgctacaagaagatcgctgccgccacggagactgctgcacaggagaatgcctcggaatacctggccatcacctctgaaagcaaagagaactgcacgggcgtccaggtggccgaaggaagcggagctactaacttcagcctgctgaagcaggctggagacgtggaggagaaccctggacctatgcacagagatgcctggctacctcgccctgccttcagcctcacggggctcagtctctttttctctttggtgccaccaggacggagcatggaggtcacagtacctgccaccctcaacgtcctcaatggctctgacgcccgcctgccctgcaccttcaactcctgctacacagtgaaccacaaacagttctccctgaactggacttaccaggagtgcaacaactgctctgaggagatgttcctccagttccgcatgaagatcattaacctgaagctggagcggtttcaagaccgcgtggagttctcagggaaccccagcaagtacgatgtgtcggtgatgctgagaaacgtgcagccggaggatgaggggatttacaactgctacatcatgaacccccctgaccgccaccgtggccatggcaagatccatctgcaggtcctcatggaagagccccctgagcgggactccacggtggccgtgattgtgggtgcctccgtcgggggcttcctggctgtggtcatcttggtgctgatggtggtcaagtgtgtgaggagaaaaaaagagcagaagctgagcacagatgacctgaagaccgaggaggagggcaagacggacggtgaaggcaacccggatgatggcgccaag

SEQ ID NO: 75 - DNA, 8088 bp, Artificial Sequence
  Polynucleotide encoding hNav1.6+P2A+hNavBeta1+P2A+hNavBeta2+P2A+hNavBeta3
atggcagcgcggctgcttgcaccaccaggccctgatagtttcaagcctttcacccctgagtcactggcaaacattgagaggcgcattgctgagagcaagctcaagaaaccaccaaaggccgatggcagtcatcgggaggacgatgaggacagcaagcccaagccaaacagcgacctggaagcagggaagagtttgcctttcatctacggggacatcccccaaggcctggttgcagttcccctggaggactttgacccatactatttgacgcagaaaacctttgtagtattaaacagagggaaaactctcttcagatttagtgccacgcctgccttgtacattttaagtccttttaacctgataagaagaatagctattaaaattttgatacattcagtatttagcatgatcattatgtgcactattttgaccaactgtgtattcatgacttttagtaaccctcctgactggtcgaagaatgtggagtacacgttcacagggatttatacatttgaatcactagtgaaaatcattgcaagaggtttctgcatagatggctttacctttttacgggacccatggaactggttagatttcagtgtcatcatgatggcgtatataacagagtttgtaaacctaggcaatgtttcagctctacgcactttcagggtactgagggctttgaaaactatttcggtaatcccaggcctgaagacaattgtgggtgccctgattcagtctgtgaagaaactgtcagatgtgatgatcctgacagtgttctgcctgagtgtttttgccttgatcggactgcagctgttcatggggaaccttcgaaacaagtgtgttgtgtggcccataaacttcaacgagagctatcttgaaaatggcaccaaaggctttgattgggaagagtatatcaacaataaaacaaatttctacacagttcctggcatgctggaacctttactctgtgggaacagttctgatgctgggcaatgcccagagggataccagtgtatgaaagcaggaaggaaccccaactatggttacacaagttttgacacttttagctgggccttcttggcattatttcgccttatgacccaggactattgggaaaacttgtatcaattgactttacgagcagccgggaaaacatacatgatcttcttcgtcttggtcatctttgtgggttctttctatctggtgaacttgatcttggctgtggtggccatggcttatgaagaacagaatcaggcaacactggaggaggcagaacaaaaagaggctgaatttaaagcaatgttggagcaacttaagaagcaacaggaagaggcacaggctgctgcgatggccacttcagcaggaactgtctcagaagatgccatagaggaagaaggtgaagaaggagggggctcccctcggagctcttctgaaatctctaaactcagctcaaagagtgcaaaggaaagacgtaacaggagaaagaagaggaagcaaaaggaactctctgaaggagaggagaaaggggatcccgagaaggtgtttaagtcagagtcagaagatggcatgagaaggaaggcctttcggctgccagacaacagaatagggaggaaattttccatcatgaatcagtcactgctcagcatcccaggctcgcccttcctctcccgccacaacagcaagagcagcatcttcagtttcaggggacctgggcggttccgagacccgggctccgagaatgagttcgcggatgacgagcacagcacggtggaggagagcgagggccgccgggactccctcttcatccccatccgggcccgcgagcgccggagcagctacagcggctacagcggctacagccagggcagccgctcctcgcgcatcttccccagcctgcggcgcagcgtgaagcgcaacagcacggtggactgcaacggcgtggtgtccctcatcggcggccccggctcccacatcggcgggcgtctcctgccagaggctacaactgaggtggaaattaagaagaaaggccctggatctcttttagtttccatggaccaattagcctcctacgggcggaaggacagaatcaacagtataatgagtgttgttacaaatacactagtagaagaactggaagagtctcagagaaagtgcccgccatgctggtataaatttgccaacactttcctcatctgggagtgccacccctactggataaaactgaaagagattgtgaacttgatagttatggacccttttgtggatttagccatcaccatctgcatcgtcctgaatacactgtttatggcaatggagcaccatcctatgacaccacaatttgaacatgtcttggctgtaggaaatctggttttcactggaattttcacagcggaaatgttcctgaagctcatagccatggatccctactattatttccaagaaggttggaacatttttgacggatttattgtctccctcagtttaatggaactgagtctagcagacgtggaggggctttcagtgctgcgatctttccgattgctccgagtcttcaaattggccaaatcctggcccaccctgaacatgctaatcaagattattggaaattcagtgggtgccctgggcaacctgacactggtgctggccattattgtcttcatctttgccgtggtggggatgcaactctttggaaaaagctacaaagagtgtgtctgcaagatcaaccaggactgtgaactccctcgctggcatatgcatgactttttccattccttcctcattgtctttcgagtgttgtgcggggagtggattgagaccatgtgggactgcatggaagtggcaggccaggccatgtgcctcattgtctttatgatggtcatggtgattggcaacttggtggtgctgaacctgtttctggccttgctcctgagctccttcagtgcagacaacctggctgccacagatgacgatggggaaatgaacaacctccagatctcagtgatccgtatcaagaagggtgtggcctggaccaaactaaaggtgcacgccttcatgcaggcccactttaagcagcgtgaggctgatgaggtgaagcctctggatgagttgtatgaaaagaaggccaactgtatcgccaatcacaccggtgcagacatccaccggaatggtgacttccagaagaatggcaatggcacaaccagcggcattggcagcagcgtggagaagtacatcattgatgaggaccacatgtccttcatcaacaaccccaacttgactgtacgggtacccattgctgtgggcgagtctgactttgagaacctcaacacagaggatgttagcagcgagtcggatcctgaaggcagcaaagataaactagatgacaccagctcctctgaaggaagcaccattgatatcaaaccagaagtagaagaggtccctgtggaacagcctgaggaatacttggatccagatgcctgcttcacagaaggttgtgtccagcggttcaagtgctgccaggtcaacatcgaggaagggctaggcaagtcttggtggatcctgcggaaaacctgcttcctcatcgtggagcacaactggtttgagaccttcatcatcttcatgattctgctgagcagtggcgccctggccttcgaggacatctacattgagcagagaaagaccatccgcaccatcctggaatatgctgacaaagtcttcacctatatcttcatcctggagatgttgctcaagtggacagcctatggcttcgtcaagttcttcaccaatgcctggtgttggctggacttcctcattgtggctgtctctttagtcagccttatagctaatgccctgggctactcggaactaggtgccataaagtcccttaggaccctaagagctttgagacccttaagagccttatcacgatttgaagggatgagggtggtggtgaatgccttggtgggcgccatcccctccatcatgaatgtgctgctggtgtgtctcatcttctggctgattttcagcatcatgggagttaacttgtttgcgggaaagtaccactactgctttaatgagacttctgaaatccgatttgaaattgaagatgtcaacaataaaactgaatgtgaaaagcttatggaggggaacaatacagagatcagatggaagaacgtgaagatcaactttgacaatgttggggcaggatacctggcccttcttcaagtagcaaccttcaaaggctggatggacatcatgtatgcagctgtagattcccggaagcctgatgagcagcctaagtatgaggacaatatctacatgtacatctattttgtcatcttcatcatcttcggctccttcttcaccctgaacctgttcattggtgtcatcattgataacttcaatcaacaaaagaaaaagttcggaggtcaggacatcttcatgaccgaagaacagaagaagtactacaatgccatgaaaaagctgggctcaaagaagccacagaaacctattccccgccccttgaacaaaatccaaggaatcgtctttgattttgtcactcagcaagcctttgacattgttatcatgatgctcatctgccttaacatggtgacaatgatggtggagacagacactcaaagcaagcagatggagaacatcctctactggattaacctggtgtttgttatcttcttcacctgtgagtgtgtgctcaaaatgtttgcgttgaggcactactacttcaccattggctggaacatcttcgacttcgtggtagtcatcctctccattgtgggaatgttcctggcagatataattgagaaatactttgtttccccaaccctattccgagtcatccgattggcccgtattgggcgcatcttgcgtctgatcaaaggcgccaaagggattcgtaccctgctctttgccttaatgatgtccttgcctgccctgttcaacatcggccttctgctcttcctggtcatgttcatcttctccatttttgggatgtccaattttgcatatgtgaagcacgaggctggtatcgatgacatgttcaactttgagacatttggcaacagcatgatctgcctgtttcaaatcacaacctcagctggttgggatggcctgctgctgcccatcctaaaccgcccccctgactgcagcctagataaggaacacccagggagtggctttaagggagattgtgggaacccctcagtgggcatcttcttctttgtaagctacatcatcatctctttcctaattgtcgtgaacatgtacattgccatcatcctggagaacttcagtgtagccacagaggaaagtgcagaccctctgagtgaggatgactttgagaccttctatgagatctgggagaagttcgaccccgatgccacccagttcattgagtactgtaagctggcagactttgcagatgccttggagcatcctctccgagtgcccaagcccaataccattgagctcatcgctatggatctgccaatggtgagcggggatcgcatccactgcttggacatcctttttgccttcaccaagcgggtcctgggagatagcggggagttggacatcctgcggcagcagatggaagagcggttcgtggcatccaatccttccaaagtgtcttacgagccaatcacaaccacactgcgtcgcaagcaggaggaggtatctgcagtggtcctgcagcgtgcctaccggggacatttggcaaggcggggcttcatctgcaaaaagacaacttctaataagctggagaatggaggcacacaccgggagaaaaaagagagcaccccatctacagcctccctcccgtcctatgacagtgtaactaaacctgaaaaggagaaacagcagcgggcagaggaaggaagaagggaaagagccaaaagacaaaaagaggtcagagaatccaagtgttagggaagcggagctactaacttcagcctgctgaagcaggctggagacgtggaggagaaccctggacctatggggaggctgctggccttagtggtcggcgcggcactggtgtcctcagcctgcgggggctgcgtggaggtggactcggagaccgaggccgtgtatgggatgaccttcaaaattctttgcatctcctgcaagcgccgcagcgagaccaacgctgagaccttcaccgagtggaccttccgccagaagggcactgaggagtttgtcaagatcctgcgctatgagaatgaggtgttgcagctggaggaggatgagcgcttcgagggccgcgtggtgtggaatggcagccggggcaccaaagacctgcaggatctgtctatcttcatcaccaatgtcacctacaaccactcgggcgactacgagtgccacgtctaccgcctgctcttcttcgaaaactacgagcacaacaccagcgtcgtcaagaagatccacattgaggtagtggacaaagccaacagagacatggcatccatcgtgtctgagatcatgatgtatgtgctcattgtggtgttgaccatatggctcgtggcagagatgatttactgctacaagaagatcgctgccgccacggagactgctgcacaggagaatgcctcggaatacctggccatcacctctgaaagcaaagagaactgcacgggcgtccaggtggccgaaggaagcggagctactaacttcagcctgctgaagcaggctggagacgtggaggagaaccctggacctatgcacagagatgcctggctacctcgccctgccttcagcctcacggggctcagtctctttttctctttggtgccaccaggacggagcatggaggtcacagtacctgccaccctcaacgtcctcaatggctctgacgcccgcctgccctgcaccttcaactcctgctacacagtgaaccacaaacagttctccctgaactggacttaccaggagtgcaacaactgctctgaggagatgttcctccagttccgcatgaagatcattaacctgaagctggagcggtttcaagaccgcgtggagttctcagggaaccccagcaagtacgatgtgtcggtgatgctgagaaacgtgcagccggaggatgaggggatttacaactgctacatcatgaacccccctgaccgccaccgtggccatggcaagatccatctgcaggtcctcatggaagagccccctgagcgggactccacggtggccgtgattgtgggtgcctccgtcgggggcttcctggctgtggtcatcttggtgctgatggtggtcaagtgtgtgaggagaaaaaaagagcagaagctgagcacagatgacctgaagaccgaggaggagggcaagacggacggtgaaggcaacccggatgatggcgccaagggaagcggagctactaacttcagcctgctgaagcaggctggagacgtggaggagaaccctggacctatgcctgccttcaatagattgtttcccctggcttctctcgtgcttatctactgggtcagtgtctgcttccctgtgtgtgtggaagtgccctcggagacggaggccgtgcagggcaaccccatgaagctgcgctgcatctcctgcatgaagagagaggaggtggaggccaccacggtggtggaatggttctacaggcccgagggcggtaaagatttccttatttacgagtatcggaatggccaccaggaggtggagagcccctttcaggggcgcctgcagtggaatggcagcaaggacctgcaggacgtgtccatcactgtgctcaacgtcactctgaacgactctggcctctacacctgcaatgtgtcccgggagtttgagtttgaggcgcatcggccctttgtgaagacgacgcggctgatccccctaagagtcaccgaggaggctggagaggacttcacctctgtggtctcagaaatcatgatgtacatccttctggtcttcctcaccttgtggctgctcatcgagatgatatattgctacagaaaggtctcaaaagccgaagaggcagcccaagaaaacgcgtctgactaccttgccatcccatctgagaacaaggagaactctgcggtaccagtggaggaatag

SEQ ID NO: 76 - DNA, 6651 bp, Artificial Sequence
  Polynucleotide encoding hNav1.7+P2A+hNavBeta1
atggcaatgttgcctcccccaggacctcagagctttgtccatttcacaaaacagtctcttgccctcattgaacaacgcattgctgaaagaaaatcaaaggaacccaaagaagaaaagaaagatgatgatgaagaagccccaaagccaagcagtgacttggaagctggcaaacagctgcccttcatctatggggacattcctcccggcatggtgtcagagcccctggaggacttggacccctactatgcagacaaaaagactttcatagtattgaacaaagggaaaacaatcttccgtttcaatgccacacctgctttatatatgctttctcctttcagtcctctaagaagaatatctattaagattttagtacactccttattcagcatgctcatcatgtgcactattctgacaaactgcatatttatgaccatgaataacccaccggactggaccaaaaatgtcgagtacacttttactggaatatatacttttgaatcacttgtaaaaatccttgcaagaggcttctgtgtaggagaattcacttttcttcgtgacccgtggaactggctggattttgtcgtcattgtttttgcgtatttaacagaatttgtaaacctaggcaatgtttcagctcttcgaactttcagagtattgagagctttgaaaactatttctgtaatcccaggcctgaagacaattgtaggggctttgatccagtcagtgaagaagctttctgatgtcatgatcctgactgtgttctgtctgagtgtgtttgcactaattggactacagctgttcatgggaaacctgaagcataaatgttttcgaaattcacttgaaaataatgaaacattagaaagcataatgaataccctagagagtgaagaagactttagaaaatatttttattacttggaaggatccaaagatgctctcctttgtggtttcagcacagattcaggtcagtgtccagaggggtacacctgtgtgaaaattggcagaaaccctgattatggctacacgagctttgacactttcagctgggccttcttagccttgtttaggctaatgacccaagattactgggaaaacctttaccaacagacgctgcgtgctgctggcaaaacctacatgatcttctttgtcgtagtgattttcctgggctccttttatctaataaacttgatcctggctgtggttgccatggcatatgaagaacagaaccaggcaaacattgaagaagctaaacagaaagaattagaatttcaacagatgttagaccgtcttaaaaaagagcaagaagaagctgaggcaattgcagcggcagcggctgaatatacaagtattaggagaagcagaattatgggcctctcagagagttcttctgaaacatccaaactgagctctaaaagtgctaaagaaagaagaaacagaagaaagaaaaagaatcaaaagaagctctccagtggagaggaaaagggagatgctgagaaattgtcgaaatcagaatcagaggacagcatcagaagaaaaagtttccaccttggtgtcgaagggcataggcgagcacatgaaaagaggttgtctacccccaatcagtcaccactcagcattcgtggctccttgttttctgcaaggcgaagcagcagaacaagtctttttagtttcaaaggcagaggaagagatataggatctgagactgaatttgccgatgatgagcacagcatttttggagacaatgagagcagaaggggctcactgtttgtgccccacagaccccaggagcgacgcagcagtaacatcagccaagccagtaggtccccaccaatgctgccggtgaacgggaaaatgcacagtgctgtggactgcaacggtgtggtctccctggttgatggacgctcagccctcatgctccccaatggacagcttctgccagagggcacgaccaatcaaatacacaagaaaaggcgttgtagttcctatctcctttcagaggatatgctgaatgatcccaacctcagacagagagcaatgagtagagcaagcatattaacaaacactgtggaagaacttgaagagtccagacaaaaatgtccaccttggtggtacagatttgcacacaaattcttgatctggaattgctctccatattggataaaattcaaaaagtgtatctattttattgtaatggatccttttgtagatcttgcaattaccatttgcatagttttaaacacattatttatggctatggaacaccacccaatgactgaggaattcaaaaatgtacttgctataggaaatttggtctttactggaatctttgcagctgaaatggtattaaaactgattgccatggatccatatgagtatttccaagtaggctggaatatttttgacagccttattgtgactttaagtttagtggagctctttctagcagatgtggaaggattgtcagttctgcgatcattcagactgctccgagtcttcaagttggcaaaatcctggccaacattgaacatgctgattaagatcattggtaactcagtaggggctctaggtaacctcaccttagtgttggccatcatcgtcttcatttttgctgtggtcggcatgcagctctttggtaagagctacaaagaatgtgtctgcaagatcaatgatgactgtacgctcccacggtggcacatgaacgacttcttccactccttcctgattgtgttccgcgtgctgtgtggagagtggatagagaccatgtgggactgtatggaggtcgctggtcaagctatgtgccttattgtttacatgatggtcatggtcattggaaacctggtggtcctaaacctatttctggccttattattgagctcatttagttcagacaatcttacagcaattgaagaagaccctgatgcaaacaacctccagattgcagtgactagaattaaaaagggaataaattatgtgaaacaaaccttacgtgaatttattctaaaagcattttccaaaaagccaaagatttccagggagataagacaagcagaagatctgaatactaagaaggaaaactatatttctaaccatacacttgctgaaatgagcaaaggtcacaatttcctcaaggaaaaagataaaatcagtggttttggaagcagcgtggacaaacacttgatggaagacagtgatggtcaatcatttattcacaatcccagcctcacagtgacagtgccaattgcacctggggaatccgatttggaaaatatgaatgctgaggaacttagcagtgattcggatagtgaatacagcaaagtgagattaaaccggtcaagctcctcagagtgcagcacagttgataaccctttgcctggagaaggagaagaagcagaggctgaacctatgaattccgatgagccagaggcctgtttcacagatggttgtgtatggaggttctcatgctgccaagttaacatagagtcagggaaaggaaaaatctggtggaacatcaggaaaacctgctacaagattgttgaacacagttggtttgaaagcttcattgtcctcatgatcctgctcagcagtggtgccctggcttttgaagatatttatattgaaaggaaaaagaccattaagattatcctggagtatgcagacaagatcttcacttacatcttcattctggaaatgcttctaaaatggatagcatatggttataaaacatatttcaccaatgcctggtgttggctggatttcctaattgttgatgtttctttggttactttagtggcaaacactcttggctactcagatcttggccccattaaatcccttcggacactgagagctttaagacctctaagagccttatctagatttgaaggaatgagggtcgttgtgaatgcactcataggagcaattccttccatcatgaatgtgctacttgtgtgtcttatattctggctgatattcagcatcatgggagtaaatttgtttgctggcaagttctatgagtgtattaacaccacagatgggtcacggtttcctgcaagtcaagttccaaatcgttccgaatgttttgcccttatgaatgttagtcaaaatgtgcgatggaaaaacctgaaagtgaactttgataatgtcggacttggttacctatctctgcttcaagttgcaacttttaagggatggacgattattatgtatgcagcagtggattctgttaatgtagacaagcagcccaaatatgaatatagcctctacatgtatatttattttgtcgtctttatcatctttgggtcattcttcactttgaacttgttcattggtgtcatcatagataatttcaaccaacagaaaaagaagcttggaggtcaagacatctttatgacagaagaacagaagaaatactataatgcaatgaaaaagctggggtccaagaagccacaaaagccaattcctcgaccagggaacaaaatccaaggatgtatatttgacctagtgacaaatcaagcctttgatattagtatcatggttcttatctgtctcaacatggtaaccatgatggtagaaaaggagggtcaaagtcaacatatgactgaagttttatattggataaatgtggtttttataatccttttcactggagaatgtgtgctaaaactgatctccctcagacactactacttcactgtaggatggaatatttttgattttgtggttgtgattatctccattgtaggtatgtttctagctgatttgattgaaacgtattttgtgtcccctaccctgttccgagtgatccgtcttgccaggattggccgaatcctacgtctagtcaaaggagcaaaggggatccgcacgctgctctttgctttgatgatgtcccttcctgcgttgtttaacatcggcctcctgctcttcctggtcatgttcatctacgccatctttggaatgtccaactttgcctatgttaaaaaggaagatggaattaatgacatgttcaattttgagacctttggcaacagtatgatttgcctgttccaaattacaacctctgctggctgggatggattgctagcacctattcttaacagtaagccacccgactgtgacccaaaaaaagttcatcctggaagttcagttgaaggagactgtggtaacccatctgttggaatattctactttgttagttatatcatcatatccttcctggttgtggtgaacatgtacattgcagtcatactggagaattttagtgttgccactgaagaaagtactgaacctctgagtgaggatgactttgagatgttctatgaggtttgggagaagtttgatcccgatgcgacccagtttatagagttctctaaactctctgattttgcagctgccctggatcctcctcttctcatagcaaaacccaacaaagtccagctcattgccatggatctgcccatggttagtggtgaccggatccattgtcttgacatcttatttgcttttacaaagcgtgttttgggtgagagtggggagatggattctcttcgttcacagatggaagaaaggttcatgtctgcaaatccttccaaagtgtcctatgaacccatcacaaccacactaaaacggaaacaagaggatgtgtctgctactgtcattcagcgtgcttatagacgttaccgcttaaggcaaaatgtcaaaaatatatcaagtatatacataaaagatggagacagagatgatgatttactcaataaaaaagatatggcttttgataatgttaatgagaactcaagtccagaaaaaacagatgccacttcatccaccacctctccaccttcatatgatagtgtaacaaagccagacaaagagaaatatgaacaagacagaacagaaaaggaagacaaagggaaagacagcaaggaaagcaaaaaaggaagcggagctactaacttcagcctgctgaagcaggctggagacgtggaggagaaccctggacctatggggaggctgctggccttagtggtcggcgcggcactggtgtcctcagcctgcgggggctgcgtggaggtggactcggagaccgaggccgtgtatgggatgaccttcaaaattctttgcatctcctgcaagcgccgcagcgagaccaacgctgagaccttcaccgagtggaccttccgccagaagggcactgaggagtttgtcaagatcctgcgctatgagaatgaggtgttgcagctggaggaggatgagcgcttcgagggccgcgtggtgtggaatggcagccggggcaccaaagacctgcaggatctgtctatcttcatcaccaatgtcacctacaaccactcgggcgactacgagtgccacgtctaccgcctgctcttcttcgaaaactacgagcacaacaccagcgtcgtcaagaagatccacattgaggtagtggacaaagccaacagagacatggcatccatcgtgtctgagatcatgatgtatgtgctcattgtggtgttgaccatatggctcgtggcagagatgatttactgctacaagaagatcgctgccgccacggagactgctgcacaggagaatgcctcggaatacctggccatcacctctgaaagcaaagagaactgcacgggcgtccaggtggccgaa

SEQ ID NO: 77 - DNA, 7362 bp, Artificial Sequence
  Polynucleotide encoding hNav1.7+P2A+hNavBeta1+P2A+hNavBeta2
atggcaatgttgcctcccccaggacctcagagctttgtccatttcacaaaacagtctcttgccctcattgaacaacgcattgctgaaagaaaatcaaaggaacccaaagaagaaaagaaagatgatgatgaagaagccccaaagccaagcagtgacttggaagctggcaaacagctgcccttcatctatggggacattcctcccggcatggtgtcagagcccctggaggacttggacccctactatgcagacaaaaagactttcatagtattgaacaaagggaaaacaatcttccgtttcaatgccacacctgctttatatatgctttctcctttcagtcctctaagaagaatatctattaagattttagtacactccttattcagcatgctcatcatgtgcactattctgacaaactgcatatttatgaccatgaataacccaccggactggaccaaaaatgtcgagtacacttttactggaatatatacttttgaatcacttgtaaaaatccttgcaagaggcttctgtgtaggagaattcacttttcttcgtgacccgtggaactggctggattttgtcgtcattgtttttgcgtatttaacagaatttgtaaacctaggcaatgtttcagctcttcgaactttcagagtattgagagctttgaaaactatttctgtaatcccaggcctgaagacaattgtaggggctttgatccagtcagtgaagaagctttctgatgtcatgatcctgactgtgttctgtctgagtgtgtttgcactaattggactacagctgttcatgggaaacctgaagcataaatgttttcgaaattcacttgaaaataatgaaacattagaaagcataatgaataccctagagagtgaagaagactttagaaaatatttttattacttggaaggatccaaagatgctctcctttgtggtttcagcacagattcaggtcagtgtccagaggggtacacctgtgtgaaaattggcagaaaccctgattatggctacacgagctttgacactttcagctgggccttcttagccttgtttaggctaatgacccaagattactgggaaaacctttaccaacagacgctgcgtgctgctggcaaaacctacatgatcttctttgtcgtagtgattttcctgggctccttttatctaataaacttgatcctggctgtggttgccatggcatatgaagaacagaaccaggcaaacattgaagaagctaaacagaaagaattagaatttcaacagatgttagaccgtcttaaaaaagagcaagaagaagctgaggcaattgcagcggcagcggctgaatatacaagtattaggagaagcagaattatgggcctctcagagagttcttctgaaacatccaaactgagctctaaaagtgctaaagaaagaagaaacagaagaaagaaaaagaatcaaaagaagctctccagtggagaggaaaagggagatgctgagaaattgtcgaaatcagaatcagaggacagcatcagaagaaaaagtttccaccttggtgtcgaagggcataggcgagcacatgaaaagaggttgtctacccccaatcagtcaccactcagcattcgtggctccttgttttctgcaaggcgaagcagcagaacaagtctttttagtttcaaaggcagaggaagagatataggatctgagactgaatttgccgatgatgagcacagcatttttggagacaatgagagcagaaggggctcactgtttgtgccccacagaccccaggagcgacgcagcagtaacatcagccaagccagtaggtccccaccaatgctgccggtgaacgggaaaatgcacagtgctgtggactgcaacggtgtggtctccctggttgatggacgctcagccctcatgctccccaatggacagcttctgccagagggcacgaccaatcaaatacacaagaaaaggcgttgtagttcctatctcctttcagaggatatgctgaatgatcccaacctcagacagagagcaatgagtagagcaagcatattaacaaacactgtggaagaacttgaagagtccagacaaaaatgtccaccttggtggtacagatttgcacacaaattcttgatctggaattgctctccatattggataaaattcaaaaagtgtatctattttattgtaatggatccttttgtagatcttgcaattaccatttgcatagttttaaacacattatttatggctatggaacaccacccaatgactgaggaattcaaaaatgtacttgctataggaaatttggtctttactggaatctttgcagctgaaatggtattaaaactgattgccatggatccatatgagtatttccaagtaggctggaatatttttgacagccttattgtgactttaagtttagtggagctctttctagcagatgtggaaggattgtcagttctgcgatcattcagactgctccgagtcttcaagttggcaaaatcctggccaacattgaacatgctgattaagatcattggtaactcagtaggggctctaggtaacctcaccttagtgttggccatcatcgtcttcatttttgctgtggtcggcatgcagctctttggtaagagctacaaagaatgtgtctgcaagatcaatgatgactgtacgctcccacggtggcacatgaacgacttcttccactccttcctgattgtgttccgcgtgctgtgtggagagtggatagagaccatgtgggactgtatggaggtcgctggtcaagctatgtgccttattgtttacatgatggtcatggtcattggaaacctggtggtcctaaacctatttctggccttattattgagctcatttagttcagacaatcttacagcaattgaagaagaccctgatgcaaacaacctccagattgcagtgactagaattaaaaagggaataaattatgtgaaacaaaccttacgtgaatttattctaaaagcattttccaaaaagccaaagatttccagggagataagacaagcagaagatctgaatactaagaaggaaaactatatttctaaccatacacttgctgaaatgagcaaaggtcacaatttcctcaaggaaaaagataaaatcagtggttttggaagcagcgtggacaaacacttgatggaagacagtgatggtcaatcatttattcacaatcccagcctcacagtgacagtgccaattgcacctggggaatccgatttggaaaatatgaatgctgaggaacttagcagtgattcggatagtgaatacagcaaagtgagattaaaccggtcaagctcctcagagtgcagcacagttgataaccctttgcctggagaaggagaagaagcagaggctgaacctatgaattccgatgagccagaggcctgtttcacagatggttgtgtatggaggttctcatgctgccaagttaacatagagtcagggaaaggaaaaatctggtggaacatcaggaaaacctgctacaagattgttgaacacagttggtttgaaagcttcattgtcctcatgatcctgctcagcagtggtgccctggcttttgaagatatttatattgaaaggaaaaagaccattaagattatcctggagtatgcagacaagatcttcacttacatcttcattctggaaatgcttctaaaatggatagcatatggttataaaacatatttcaccaatgcctggtgttggctggatttcctaattgttgatgtttctttggttactttagtggcaaacactcttggctactcagatcttggccccattaaatcccttcggacactgagagctttaagacctctaagagccttatctagatttgaaggaatgagggtcgttgtgaatgcactcataggagcaattccttccatcatgaatgtgctacttgtgtgtcttatattctggctgatattcagcatcatgggagtaaatttgtttgctggcaagttctatgagtgtattaacaccacagatgggtcacggtttcctgcaagtcaagttccaaatcgttccgaatgttttgcccttatgaatgttagtcaaaatgtgcgatggaaaaacctgaaagtgaactttgataatgtcggacttggttacctatctctgcttcaagttgcaacttttaagggatggacgattattatgtatgcagcagtggattctgttaatgtagacaagcagcccaaatatgaatatagcctctacatgtatatttattttgtcgtctttatcatctttgggtcattcttcactttgaacttgttcattggtgtcatcatagataatttcaaccaacagaaaaagaagcttggaggtcaagacatctttatgacagaagaacagaagaaatactataatgcaatgaaaaagctggggtccaagaagccacaaaagccaattcctcgaccagggaacaaaatccaaggatgtatatttgacctagtgacaaatcaagcctttgatattagtatcatggttcttatctgtctcaacatggtaaccatgatggtagaaaaggagggtcaaagtcaacatatgactgaagttttatattggataaatgtggtttttataatccttttcactggagaatgtgtgctaaaactgatctccctcagacactactacttcactgtaggatggaatatttttgattttgtggttgtgattatctccattgtaggtatgtttctagctgatttgattgaaacgtattttgtgtcccctaccctgttccgagtgatccgtcttgccaggattggccgaatcctacgtctagtcaaaggagcaaaggggatccgcacgctgctctttgctttgatgatgtcccttcctgcgttgtttaacatcggcctcctgctcttcctggtcatgttcatctacgccatctttggaatgtccaactttgcctatgttaaaaaggaagatggaattaatgacatgttcaattttgagacctttggcaacagtatgatttgcctgttccaaattacaacctctgctggctgggatggattgctagcacctattcttaacagtaagccacccgactgtgacccaaaaaaagttcatcctggaagttcagttgaaggagactgtggtaacccatctgttggaatattctactttgttagttatatcatcatatccttcctggttgtggtgaacatgtacattgcagtcatactggagaattttagtgttgccactgaagaaagtactgaacctctgagtgaggatgactttgagatgttctatgaggtttgggagaagtttgatcccgatgcgacccagtttatagagttctctaaactctctgattttgcagctgccctggatcctcctcttctcatagcaaaacccaacaaagtccagctcattgccatggatctgcccatggttagtggtgaccggatccattgtcttgacatcttatttgcttttacaaagcgtgttttgggtgagagtggggagatggattctcttcgttcacagatggaagaaaggttcatgtctgcaaatccttccaaagtgtcctatgaacccatcacaaccacactaaaacggaaacaagaggatgtgtctgctactgtcattcagcgtgcttatagacgttaccgcttaaggcaaaatgtcaaaaatatatcaagtatatacataaaagatggagacagagatgatgatttactcaataaaaaagatatggcttttgataatgttaatgagaactcaagtccagaaaaaacagatgccacttcatccaccacctctccaccttcatatgatagtgtaacaaagccagacaaagagaaatatgaacaagacagaacagaaaaggaagacaaagggaaagacagcaaggaaagcaaaaaaggaagcggagctactaacttcagcctgctgaagcaggctggagacgtggaggagaaccctggacctatggggaggctgctggccttagtggtcggcgcggcactggtgtcctcagcctgcgggggctgcgtggaggtggactcggagaccgaggccgtgtatgggatgaccttcaaaattctttgcatctcctgcaagcgccgcagcgagaccaacgctgagaccttcaccgagtggaccttccgccagaagggcactgaggagtttgtcaagatcctgcgctatgagaatgaggtgttgcagctggaggaggatgagcgcttcgagggccgcgtggtgtggaatggcagccggggcaccaaagacctgcaggatctgtctatcttcatcaccaatgtcacctacaaccactcgggcgactacgagtgccacgtctaccgcctgctcttcttcgaaaactacgagcacaacaccagcgtcgtcaagaagatccacattgaggtagtggacaaagccaacagagacatggcatccatcgtgtctgagatcatgatgtatgtgctcattgtggtgttgaccatatggctcgtggcagagatgatttactgctacaagaagatcgctgccgccacggagactgctgcacaggagaatgcctcggaatacctggccatcacctctgaaagcaaagagaactgcacgggcgtccaggtggccgaaggaagcggagctactaacttcagcctgctgaagcaggctggagacgtggaggagaaccctggacctatgcacagagatgcctggctacctcgccctgccttcagcctcacggggctcagtctctttttctctttggtgccaccaggacggagcatggaggtcacagtacctgccaccctcaacgtcctcaatggctctgacgcccgcctgccctgcaccttcaactcctgctacacagtgaaccacaaacagttctccctgaactggacttaccaggagtgcaacaactgctctgaggagatgttcctccagttccgcatgaagatcattaacctgaagctggagcggtttcaagaccgcgtggagttctcagggaaccccagcaagtacgatgtgtcggtgatgctgagaaacgtgcagccggaggatgaggggatttacaactgctacatcatgaacccccctgaccgccaccgtggccatggcaagatccatctgcaggtcctcatggaagagccccctgagcgggactccacggtggccgtgattgtgggtgcctccgtcgggggcttcctggctgtggtcatcttggtgctgatggtggtcaagtgtgtgaggagaaaaaaagagcagaagctgagcacagatgacctgaagaccgaggaggagggcaagacggacggtgaaggcaacccggatgatggcgccaag

SEQ ID NO: 78 - DNA, 8076 bp, Artificial Sequence
  Polynucleotide encoding hNav1.7+P2A+hNavBeta1+P2A+hNavBeta2+P2A+hNavBeta3
atggcaatgttgcctcccccaggacctcagagctttgtccatttcacaaaacagtctcttgccctcattgaacaacgcattgctgaaagaaaatcaaaggaacccaaagaagaaaagaaagatgatgatgaagaagccccaaagccaagcagtgacttggaagctggcaaacagctgcccttcatctatggggacattcctcccggcatggtgtcagagcccctggaggacttggacccctactatgcagacaaaaagactttcatagtattgaacaaagggaaaacaatcttccgtttcaatgccacacctgctttatatatgctttctcctttcagtcctctaagaagaatatctattaagattttagtacactccttattcagcatgctcatcatgtgcactattctgacaaactgcatatttatgaccatgaataacccaccggactggaccaaaaatgtcgagtacacttttactggaatatatacttttgaatcacttgtaaaaatccttgcaagaggcttctgtgtaggagaattcacttttcttcgtgacccgtggaactggctggattttgtcgtcattgtttttgcgtatttaacagaatttgtaaacctaggcaatgtttcagctcttcgaactttcagagtattgagagctttgaaaactatttctgtaatcccaggcctgaagacaattgtaggggctttgatccagtcagtgaagaagctttctgatgtcatgatcctgactgtgttctgtctgagtgtgtttgcactaattggactacagctgttcatgggaaacctgaagcataaatgttttcgaaattcacttgaaaataatgaaacattagaaagcataatgaataccctagagagtgaagaagactttagaaaatatttttattacttggaaggatccaaagatgctctcctttgtggtttcagcacagattcaggtcagtgtccagaggggtacacctgtgtgaaaattggcagaaaccctgattatggctacacgagctttgacactttcagctgggccttcttagccttgtttaggctaatgacccaagattactgggaaaacctttaccaacagacgctgcgtgctgctggcaaaacctacatgatcttctttgtcgtagtgattttcctgggctccttttatctaataaacttgatcctggctgtggttgccatggcatatgaagaacagaaccaggcaaacattgaagaagctaaacagaaagaattagaatttcaacagatgttagaccgtcttaaaaaagagcaagaagaagctgaggcaattgcagcggcagcggctgaatatacaagtattaggagaagcagaattatgggcctctcagagagttcttctgaaacatccaaactgagctctaaaagtgctaaagaaagaagaaacagaagaaagaaaaagaatcaaaagaagctctccagtggagaggaaaagggagatgctgagaaattgtcgaaatcagaatcagaggacagcatcagaagaaaaagtttccaccttggtgtcgaagggcataggcgagcacatgaaaagaggttgtctacccccaatcagtcaccactcagcattcgtggctccttgttttctgcaaggcgaagcagcagaacaagtctttttagtttcaaaggcagaggaagagatataggatctgagactgaatttgccgatgatgagcacagcatttttggagacaatgagagcagaaggggctcactgtttgtgccccacagaccccaggagcgacgcagcagtaacatcagccaagccagtaggtccccaccaatgctgccggtgaacgggaaaatgcacagtgctgtggactgcaacggtgtggtctccctggttgatggacgctcagccctcatgctccccaatggacagcttctgccagagggcacgaccaatcaaatacacaagaaaaggcgttgtagttcctatctcctttcagaggatatgctgaatgatcccaacctcagacagagagcaatgagtagagcaagcatattaacaaacactgtggaagaacttgaagagtccagacaaaaatgtccaccttggtggtacagatttgcacacaaattcttgatctggaattgctctccatattggataaaattcaaaaagtgtatctattttattgtaatggatccttttgtagatcttgcaattaccatttgcatagttttaaacacattatttatggctatggaacaccacccaatgactgaggaattcaaaaatgtacttgctataggaaatttggtctttactggaatctttgcagctgaaatggtattaaaactgattgccatggatccatatgagtatttccaagtaggctggaatatttttgacagccttattgtgactttaagtttagtggagctctttctagcagatgtggaaggattgtcagttctgcgatcattcagactgctccgagtcttcaagttggcaaaatcctggccaacattgaacatgctgattaagatcattggtaactcagtaggggctctaggtaacctcaccttagtgttggccatcatcgtcttcatttttgctgtggtcggcatgcagctctttggtaagagctacaaagaatgtgtctgcaagatcaatgatgactgtacgctcccacggtggcacatgaacgacttcttccactccttcctgattgtgttccgcgtgctgtgtggagagtggatagagaccatgtgggactgtatggaggtcgctggtcaagctatgtgccttattgtttacatgatggtcatggtcattggaaacctggtggtcctaaacctatttctggccttattattgagctcatttagttcagacaatcttacagcaattgaagaagaccctgatgcaaacaacctccagattgcagtgactagaattaaaaagggaataaattatgtgaaacaaaccttacgtgaatttattctaaaagcattttccaaaaagccaaagatttccagggagataagacaagcagaagatctgaatactaagaaggaaaactatatttctaaccatacacttgctgaaatgagcaaaggtcacaatttcctcaaggaaaaagataaaatcagtggttttggaagcagcgtggacaaacacttgatggaagacagtgatggtcaatcatttattcacaatcccagcctcacagtgacagtgccaattgcacctggggaatccgatttggaaaatatgaatgctgaggaacttagcagtgattcggatagtgaatacagcaaagtgagattaaaccggtcaagctcctcagagtgcagcacagttgataaccctttgcctggagaaggagaagaagcagaggctgaacctatgaattccgatgagccagaggcctgtttcacagatggttgtgtatggaggttctcatgctgccaagttaacatagagtcagggaaaggaaaaatctggtggaacatcaggaaaacctgctacaagattgttgaacacagttggtttgaaagcttcattgtcctcatgatcctgctcagcagtggtgccctggcttttgaagatatttatattgaaaggaaaaagaccattaagattatcctggagtatgcagacaagatcttcacttacatcttcattctggaaatgcttctaaaatggatagcatatggttataaaacatatttcaccaatgcctggtgttggctggatttcctaattgttgatgtttctttggttactttagtggcaaacactcttggctactcagatcttggccccattaaatcccttcggacactgagagctttaagacctctaagagccttatctagatttgaaggaatgagggtcgttgtgaatgcactcataggagcaattccttccatcatgaatgtgctacttgtgtgtcttatattctggctgatattcagcatcatgggagtaaatttgtttgctggcaagttctatgagtgtattaacaccacagatgggtcacggtttcctgcaagtcaagttccaaatcgttccgaatgttttgcccttatgaatgttagtcaaaatgtgcgatggaaaaacctgaaagtgaactttgataatgtcggacttggttacctatctctgcttcaagttgcaacttttaagggatggacgattattatgtatgcagcagtggattctgttaatgtagacaagcagcccaaatatgaatatagcctctacatgtatatttattttgtcgtctttatcatctttgggtcattcttcactttgaacttgttcattggtgtcatcatagataatttcaaccaacagaaaaagaagcttggaggtcaagacatctttatgacagaagaacagaagaaatactataatgcaatgaaaaagctggggtccaagaagccacaaaagccaattcctcgaccagggaacaaaatccaaggatgtatatttgacctagtgacaaatcaagcctttgatattagtatcatggttcttatctgtctcaacatggtaaccatgatggtagaaaaggagggtcaaagtcaacatatgactgaagttttatattggataaatgtggtttttataatccttttcactggagaatgtgtgctaaaactgatctccctcagacactactacttcactgtaggatggaatatttttgattttgtggttgtgattatctccattgtaggtatgtttctagctgatttgattgaaacgtattttgtgtcccctaccctgttccgagtgatccgtcttgccaggattggccgaatcctacgtctagtcaaaggagcaaaggggatccgcacgctgctctttgctttgatgatgtcccttcctgcgttgtttaacatcggcctcctgctcttcctggtcatgttcatctacgccatctttggaatgtccaactttgcctatgttaaaaaggaagatggaattaatgacatgttcaattttgagacctttggcaacagtatgatttgcctgttccaaattacaacctctgctggctgggatggattgctagcacctattcttaacagtaagccacccgactgtgacccaaaaaaagttcatcctggaagttcagttgaaggagactgtggtaacccatctgttggaatattctactttgttagttatatcatcatatccttcctggttgtggtgaacatgtacattgcagtcatactggagaattttagtgttgccactgaagaaagtactgaacctctgagtgaggatgactttgagatgttctatgaggtttgggagaagtttgatcccgatgcgacccagtttatagagttctctaaactctctgattttgcagctgccctggatcctcctcttctcatagcaaaacccaacaaagtccagctcattgccatggatctgcccatggttagtggtgaccggatccattgtcttgacatcttatttgcttttacaaagcgtgttttgggtgagagtggggagatggattctcttcgttcacagatggaagaaaggttcatgtctgcaaatccttccaaagtgtcctatgaacccatcacaaccacactaaaacggaaacaagaggatgtgtctgctactgtcattcagcgtgcttatagacgttaccgcttaaggcaaaatgtcaaaaatatatcaagtatatacataaaagatggagacagagatgatgatttactcaataaaaaagatatggcttttgataatgttaatgagaactcaagtccagaaaaaacagatgccacttcatccaccacctctccaccttcatatgatagtgtaacaaagccagacaaagagaaatatgaacaagacagaacagaaaaggaagacaaagggaaagacagcaaggaaagcaaaaaaggaagcggagctactaacttcagcctgctgaagcaggctggagacgtggaggagaaccctggacctatggggaggctgctggccttagtggtcggcgcggcactggtgtcctcagcctgcgggggctgcgtggaggtggactcggagaccgaggccgtgtatgggatgaccttcaaaattctttgcatctcctgcaagcgccgcagcgagaccaacgctgagaccttcaccgagtggaccttccgccagaagggcactgaggagtttgtcaagatcctgcgctatgagaatgaggtgttgcagctggaggaggatgagcgcttcgagggccgcgtggtgtggaatggcagccggggcaccaaagacctgcaggatctgtctatcttcatcaccaatgtcacctacaaccactcgggcgactacgagtgccacgtctaccgcctgctcttcttcgaaaactacgagcacaacaccagcgtcgtcaagaagatccacattgaggtagtggacaaagccaacagagacatggcatccatcgtgtctgagatcatgatgtatgtgctcattgtggtgttgaccatatggctcgtggcagagatgatttactgctacaagaagatcgctgccgccacggagactgctgcacaggagaatgcctcggaatacctggccatcacctctgaaagcaaagagaactgcacgggcgtccaggtggccgaaggaagcggagctactaacttcagcctgctgaagcaggctggagacgtggaggagaaccctggacctatgcacagagatgcctggctacctcgccctgccttcagcctcacggggctcagtctctttttctctttggtgccaccaggacggagcatggaggtcacagtacctgccaccctcaacgtcctcaatggctctgacgcccgcctgccctgcaccttcaactcctgctacacagtgaaccacaaacagttctccctgaactggacttaccaggagtgcaacaactgctctgaggagatgttcctccagttccgcatgaagatcattaacctgaagctggagcggtttcaagaccgcgtggagttctcagggaaccccagcaagtacgatgtgtcggtgatgctgagaaacgtgcagccggaggatgaggggatttacaactgctacatcatgaacccccctgaccgccaccgtggccatggcaagatccatctgcaggtcctcatggaagagccccctgagcgggactccacggtggccgtgattgtgggtgcctccgtcgggggcttcctggctgtggtcatcttggtgctgatggtggtcaagtgtgtgaggagaaaaaaagagcagaagctgagcacagatgacctgaagaccgaggaggagggcaagacggacggtgaaggcaacccggatgatggcgccaagggaagcggagctactaacttcagcctgctgaagcaggctggagacgtggaggagaaccctggacctatgcctgccttcaatagattgtttcccctggcttctctcgtgcttatctactgggtcagtgtctgcttccctgtgtgtgtggaagtgccctcggagacggaggccgtgcagggcaaccccatgaagctgcgctgcatctcctgcatgaagagagaggaggtggaggccaccacggtggtggaatggttctacaggcccgagggcggtaaagatttccttatttacgagtatcggaatggccaccaggaggtggagagcccctttcaggggcgcctgcagtggaatggcagcaaggacctgcaggacgtgtccatcactgtgctcaacgtcactctgaacgactctggcctctacacctgcaatgtgtcccgggagtttgagtttgaggcgcatcggccctttgtgaagacgacgcggctgatccccctaagagtcaccgaggaggctggagaggacttcacctctgtggtctcagaaatcatgatgtacatccttctggtcttcctcaccttgtggctgctcatcgagatgatatattgctacagaaaggtctcaaaagccgaagaggcagcccaagaaaacgcgtctgactaccttgccatcccatctgagaacaaggagaactctgcggtaccagtggaggaatag

SEQ ID NO: 79 - DNA, 6588 bp, Artificial Sequence
  Polynucleotide encoding hNav1.8+P2A+hNavBeta1
atggagttccccatcggcagcctggagaccaacaacttcagaagattcacccccgagagcctggtggagatcgagaagcagatcgccgccaagcagggcaccaagaaggccagagagaagcacagagagcagaaggaccaggaggagaagcccagaccccagctggacctgaaggcctgcaaccagctgcccaagttctacggcgagctgcccgccgagctgatcggcgagcccctggaggacctggaccccttctacagcacccacagaaccttcatggtgctgaacaagggcagaaccatcagcagattcagcgccaccagagccctgtggctgttcagccccttcaacctgatcagaagaaccgccatcaaggtgagcgtgcacagctggttcagcctgttcatcaccgtgaccatcctggtgaactgcgtgtgcatgaccagaaccgacctgcccgagaagatcgagtacgtgttcaccgtgatctacaccttcgaggccctgatcaagatcctggccagaggcttctgcctgaacgagttcacctacctgagagacccctggaactggctggacttcagcgtgatcaccctggcctacgtgggcaccgccatcgacctgagaggcatcagcggcctgagaaccttcagagtgctgagagccctgaagaccgtgagcgtgatccccggcctgaaggtgatcgtgggcgccctgatccacagcgtgaagaagctggccgacgtgaccatcctgaccatcttctgcctgagcgtgttcgccctggtgggcctgcagctgttcaagggcaacctgaagaacaagtgcgtgaagaacgacatggccgtgaacgagaccaccaactacagcagccacagaaagcccgacatctacatcaacaagagaggcaccagcgaccccctgctgtgcggcaacggcagcgacagcggccactgccccgacggctacatctgcctgaagaccagcgacaaccccgacttcaactacaccagcttcgacagcttcgcctgggccttcctgagcctgttcagactgatgacccaggacagctgggagagactgtaccagcagaccctgagaaccagcggcaagatctacatgatcttcttcgtgctggtgatcttcctgggcagcttctacctggtgaacctgatcctggccgtggtgaccatggcctacgaggagcagaaccaggccaccaccgacgagatcgaggccaaggagaagaagttccaggaggccctggagatgctgagaaaggagcaggaggtgctggccgccctgggcatcgacaccaccagcctgcacagccacaacggcagccccctgaccagcaagaacgccagcgagagaagacacagaatcaagcccagagtgagcgagggcagcaccgaggacaacaagagccccagaagcgacccctacaaccagagaagaatgagcttcctgggcctggccagcggcaagagaagagccagccacggcagcgtgttccacttcagaagccccggcagagacatcagcctgcccgagggcgtgaccgacgacggcgtgttccccggcgaccacgagagccacagaggcagcctgctgctgggcggcggcgccggccagcagggccccctgcccagaagccccctgccccagcccagcaaccccgacagcagacacggcgaggacgagcaccagcccccccccaccagcgagctggcccccggcgccgtggacgtgagcgccttcgacgccggccagaagaagaccttcctgagcgccgagtacctggacgagcccttcagagcccagagagccatgagcgtggtgagcatcatcaccagcgtgctggaggagctggaggagagcgagcagaagtgccccccctgcctgaccagcctgagccagaagtacctgatctgggactgctgccccatgtgggtgaagctgaagaccatcctgttcggcctggtgaccgaccccttcgccgagctgaccatcaccctgtgcatcgtggtgaacaccatcttcatggccatggagcaccacggcatgagccccaccttcgaggccatgctgcagatcggcaacatcgtgttcaccatcttcttcaccgccgagatggtgttcaagatcatcgccttcgacccctactactacttccagaagaagtggaacatcttcgactgcatcatcgtgaccgtgagcctgctggagctgggcgtggccaagaagggcagcctgagcgtgctgagaagcttcagactgctgagagtgttcaagctggccaagagctggcccaccctgaacaccctgatcaagatcatcggcaacagcgtgggcgccctgggcaacctgaccatcatcctggccatcatcgtgttcgtgttcgccctggtgggcaagcagctgctgggcgagaactacagaaacaacagaaagaacatcagcgccccccacgaggactggcccagatggcacatgcacgacttcttccacagcttcctgatcgtgttcagaatcctgtgcggcgagtggatcgagaacatgtgggcctgcatggaggtgggccagaagagcatctgcctgatcctgttcctgaccgtgatggtgctgggcaacctggtggtgctgaacctgttcatcgccctgctgctgaacagcttcagcgccgacaacctgaccgcccccgaggacgacggcgaggtgaacaacctgcaggtggccctggccagaatccaggtgttcggccacagaaccaagcaggccctgtgcagcttcttcagcagaagctgccccttcccccagcccaaggccgagcccgagctggtggtgaagctgcccctgagcagcagcaaggccgagaaccacatcgccgccaacaccgccagaggcagcagcggcggcctgcaggcccccagaggccccagagacgagcacagcgacttcatcgccaaccccaccgtgtgggtgagcgtgcccatcgccgagggcgagagcgacctggacgacctggaggacgacggcggcgaggacgcccagagcttccagcaggaggtgatccccaagggccagcaggagcagctgcagcaggtggagagatgcggcgaccacctgacccccagaagccccggcaccggcaccagcagcgaggacctggcccccagcctgggcgagacctggaaggacgagagcgtgccccaggtgcccgccgagggcgtggacgacaccagcagcagcgagggcagcaccgtggactgcctggaccccgaggagatcctgagaaagatccccgagctggccgacgacctggaggagcccgacgactgcttcaccgagggctgcatcagacactgcccctgctgcaagctggacaccaccaagagcccctgggacgtgggctggcaggtgagaaagacctgctacagaatcgtggagcacagctggttcgagagcttcatcatcttcatgatcctgctgagcagcggcagcctggccttcgaggactactacctggaccagaagcccaccgtgaaggccctgctggagtacaccgacagagtgttcaccttcatcttcgtgttcgagatgctgctgaagtgggtggcctacggcttcaagaagtacttcaccaacgcctggtgctggctggacttcctgatcgtgaacatcagcctgatcagcctgaccgccaagatcctggagtacagcgaggtggcccccatcaaggccctgagaaccctgagagccctgagacccctgagagccctgagcagattcgagggcatgagagtggtggtggacgccctggtgggcgccatccccagcatcatgaacgtgctgctggtgtgcctgatcttctggctgatcttcagcatcatgggcgtgaacctgttcgccggcaagttctggagatgcatcaactacaccgacggcgagttcagcctggtgcccctgagcatcgtgaacaacaagagcgactgcaagatccagaacagcaccggcagcttcttctgggtgaacgtgaaggtgaacttcgacaacgtggccatgggctacctggccctgctgcaggtggccaccttcaagggctggatggacatcatgtacgccgccgtggacagcagagaggtgaacatgcagcccaagtgggaggacaacgtgtacatgtacctgtacttcgtgatcttcatcatcttcggcggcttcttcaccctgaacctgttcgtgggcgtgatcatcgacaacttcaaccagcagaagaagaagctgggcggccaggacatcttcatgaccgaggagcagaagaagtactacaacgccatgaagaagctgggcagcaagaagccccagaagcccatccccagacccctgaacaagttccagggcttcgtgttcgacatcgtgaccagacaggccttcgacatcaccatcatggtgctgatctgcctgaacatgatcaccatgatggtggagaccgacgaccagagcgaggagaagaccaagatcctgggcaagatcaaccagttcttcgtggccgtgttcaccggcgagtgcgtgatgaagatgttcgccctgagacagtactacttcaccaacggctggaacgtgttcgacttcatcgtggtggtgctgagcatcgccagcctgatcttcagcgccatcctgaagagcctgcagagctacttcagccccaccctgttcagagtgatcagactggccagaatcggcagaatcctgagactgatcagagccgccaagggcatcagaaccctgctgttcgccctgatgatgagcctgcccgccctgttcaacatcggcctgctgctgttcctggtgatgttcatctacagcatcttcggcatgagcagcttcccccacgtgagatgggaggccggcatcgacgacatgttcaacttccagaccttcgccaacagcatgctgtgcctgttccagatcaccaccagcgccggctgggacggcctgctgagccccatcctgaacaccggccccccctactgcgaccccaacctgcccaacagcaacggcaccagaggcgactgcggcagccccgccgtgggcatcatcttcttcaccacctacatcatcatcagcttcctgatcatggtgaacatgtacatcgccgtgatcctggagaacttcaacgtggccaccgaggagagcaccgagcccctgagcgaggacgacttcgacatgttctacgagacctgggagaagttcgaccccgaggccacccagttcatcaccttcagcgccctgagcgacttcgccgacaccctgagcggccccctgagaatccccaagcccaacagaaacatcctgatccagatggacctgcccctggtgcccggcgacaagatccactgcctggacatcctgttcgccttcaccaagaacgtgctgggcgagagcggcgagctggacagcctgaaggccaacatggaggagaagttcatggccaccaacctgagcaagagcagctacgagcccatcgccaccaccctgagatggaagcaggaggacatcagcgccaccgtgatccagaaggcctacagaagctacgtgctgcacagaagcatggccctgagcaacaccccctgcgtgcccagagccgaggaggaggccgccagcctgcccgacgagggcttcgtggccttcaccgccaacgagaactgcgtgctgcccgacaagagcgagaccgccagcgccaccagcttcccccccagctacgagagcgtgaccagaggcctgagcgacagagtgaacatgagaaccagcagcagcatccagaacgaggacgaggccaccagcatggagctgatcgcccccggccccggaagcggagctactaacttcagcctgctgaagcaggctggagacgtggaggagaaccctggacctatggggaggctgctggccttagtggtcggcgcggcactggtgtcctcagcctgcgggggctgcgtggaggtggactcggagaccgaggccgtgtatgggatgaccttcaaaattctttgcatctcctgcaagcgccgcagcgagaccaacgctgagaccttcaccgagtggaccttccgccagaagggcactgaggagtttgtcaagatcctgcgctatgagaatgaggtgttgcagctggaggaggatgagcgcttcgagggccgcgtggtgtggaatggcagccggggcaccaaagacctgcaggatctgtctatcttcatcaccaatgtcacctacaaccactcgggcgactacgagtgccacgtctaccgcctgctcttcttcgaaaactacgagcacaacaccagcgtcgtcaagaagatccacattgaggtagtggacaaagccaacagagacatggcatccatcgtgtctgagatcatgatgtatgtgctcattgtggtgttgaccatatggctcgtggcagagatgatttactgctacaagaagatcgctgccgccacggagactgctgcacaggagaatgcctcggaatacctggccatcacctctgaaagcaaagagaactgcacgggcgtccaggtggccgaa

SEQ ID NO: 80 - DNA, 7299 bp, Artificial Sequence
  Polynucleotide encoding hNav1.8+P2A+hNavBeta1+P2A+hNavBeta2
atggagttccccatcggcagcctggagaccaacaacttcagaagattcacccccgagagcctggtggagatcgagaagcagatcgccgccaagcagggcaccaagaaggccagagagaagcacagagagcagaaggaccaggaggagaagcccagaccccagctggacctgaaggcctgcaaccagctgcccaagttctacggcgagctgcccgccgagctgatcggcgagcccctggaggacctggaccccttctacagcacccacagaaccttcatggtgctgaacaagggcagaaccatcagcagattcagcgccaccagagccctgtggctgttcagccccttcaacctgatcagaagaaccgccatcaaggtgagcgtgcacagctggttcagcctgttcatcaccgtgaccatcctggtgaactgcgtgtgcatgaccagaaccgacctgcccgagaagatcgagtacgtgttcaccgtgatctacaccttcgaggccctgatcaagatcctggccagaggcttctgcctgaacgagttcacctacctgagagacccctggaactggctggacttcagcgtgatcaccctggcctacgtgggcaccgccatcgacctgagaggcatcagcggcctgagaaccttcagagtgctgagagccctgaagaccgtgagcgtgatccccggcctgaaggtgatcgtgggcgccctgatccacagcgtgaagaagctggccgacgtgaccatcctgaccatcttctgcctgagcgtgttcgccctggtgggcctgcagctgttcaagggcaacctgaagaacaagtgcgtgaagaacgacatggccgtgaacgagaccaccaactacagcagccacagaaagcccgacatctacatcaacaagagaggcaccagcgaccccctgctgtgcggcaacggcagcgacagcggccactgccccgacggctacatctgcctgaagaccagcgacaaccccgacttcaactacaccagcttcgacagcttcgcctgggccttcctgagcctgttcagactgatgacccaggacagctgggagagactgtaccagcagaccctgagaaccagcggcaagatctacatgatcttcttcgtgctggtgatcttcctgggcagcttctacctggtgaacctgatcctggccgtggtgaccatggcctacgaggagcagaaccaggccaccaccgacgagatcgaggccaaggagaagaagttccaggaggccctggagatgctgagaaaggagcaggaggtgctggccgccctgggcatcgacaccaccagcctgcacagccacaacggcagccccctgaccagcaagaacgccagcgagagaagacacagaatcaagcccagagtgagcgagggcagcaccgaggacaacaagagccccagaagcgacccctacaaccagagaagaatgagcttcctgggcctggccagcggcaagagaagagccagccacggcagcgtgttccacttcagaagccccggcagagacatcagcctgcccgagggcgtgaccgacgacggcgtgttccccggcgaccacgagagccacagaggcagcctgctgctgggcggcggcgccggccagcagggccccctgcccagaagccccctgccccagcccagcaaccccgacagcagacacggcgaggacgagcaccagcccccccccaccagcgagctggcccccggcgccgtggacgtgagcgccttcgacgccggccagaagaagaccttcctgagcgccgagtacctggacgagcccttcagagcccagagagccatgagcgtggtgagcatcatcaccagcgtgctggaggagctggaggagagcgagcagaagtgccccccctgcctgaccagcctgagccagaagtacctgatctgggactgctgccccatgtgggtgaagctgaagaccatcctgttcggcctggtgaccgaccccttcgccgagctgaccatcaccctgtgcatcgtggtgaacaccatcttcatggccatggagcaccacggcatgagccccaccttcgaggccatgctgcagatcggcaacatcgtgttcaccatcttcttcaccgccgagatggtgttcaagatcatcgccttcgacccctactactacttccagaagaagtggaacatcttcgactgcatcatcgtgaccgtgagcctgctggagctgggcgtggccaagaagggcagcctgagcgtgctgagaagcttcagactgctgagagtgttcaagctggccaagagctggcccaccctgaacaccctgatcaagatcatcggcaacagcgtgggcgccctgggcaacctgaccatcatcctggccatcatcgtgttcgtgttcgccctggtgggcaagcagctgctgggcgagaactacagaaacaacagaaagaacatcagcgccccccacgaggactggcccagatggcacatgcacgacttcttccacagcttcctgatcgtgttcagaatcctgtgcggcgagtggatcgagaacatgtgggcctgcatggaggtgggccagaagagcatctgcctgatcctgttcctgaccgtgatggtgctgggcaacctggtggtgctgaacctgttcatcgccctgctgctgaacagcttcagcgccgacaacctgaccgcccccgaggacgacggcgaggtgaacaacctgcaggtggccctggccagaatccaggtgttcggccacagaaccaagcaggccctgtgcagcttcttcagcagaagctgccccttcccccagcccaaggccgagcccgagctggtggtgaagctgcccctgagcagcagcaaggccgagaaccacatcgccgccaacaccgccagaggcagcagcggcggcctgcaggcccccagaggccccagagacgagcacagcgacttcatcgccaaccccaccgtgtgggtgagcgtgcccatcgccgagggcgagagcgacctggacgacctggaggacgacggcggcgaggacgcccagagcttccagcaggaggtgatccccaagggccagcaggagcagctgcagcaggtggagagatgcggcgaccacctgacccccagaagccccggcaccggcaccagcagcgaggacctggcccccagcctgggcgagacctggaaggacgagagcgtgccccaggtgcccgccgagggcgtggacgacaccagcagcagcgagggcagcaccgtggactgcctggaccccgaggagatcctgagaaagatccccgagctggccgacgacctggaggagcccgacgactgcttcaccgagggctgcatcagacactgcccctgctgcaagctggacaccaccaagagcccctgggacgtgggctggcaggtgagaaagacctgctacagaatcgtggagcacagctggttcgagagcttcatcatcttcatgatcctgctgagcagcggcagcctggccttcgaggactactacctggaccagaagcccaccgtgaaggccctgctggagtacaccgacagagtgttcaccttcatcttcgtgttcgagatgctgctgaagtgggtggcctacggcttcaagaagtacttcaccaacgcctggtgctggctggacttcctgatcgtgaacatcagcctgatcagcctgaccgccaagatcctggagtacagcgaggtggcccccatcaaggccctgagaaccctgagagccctgagacccctgagagccctgagcagattcgagggcatgagagtggtggtggacgccctggtgggcgccatccccagcatcatgaacgtgctgctggtgtgcctgatcttctggctgatcttcagcatcatgggcgtgaacctgttcgccggcaagttctggagatgcatcaactacaccgacggcgagttcagcctggtgcccctgagcatcgtgaacaacaagagcgactgcaagatccagaacagcaccggcagcttcttctgggtgaacgtgaaggtgaacttcgacaacgtggccatgggctacctggccctgctgcaggtggccaccttcaagggctggatggacatcatgtacgccgccgtggacagcagagaggtgaacatgcagcccaagtgggaggacaacgtgtacatgtacctgtacttcgtgatcttcatcatcttcggcggcttcttcaccctgaacctgttcgtgggcgtgatcatcgacaacttcaaccagcagaagaagaagctgggcggccaggacatcttcatgaccgaggagcagaagaagtactacaacgccatgaagaagctgggcagcaagaagccccagaagcccatccccagacccctgaacaagttccagggcttcgtgttcgacatcgtgaccagacaggccttcgacatcaccatcatggtgctgatctgcctgaacatgatcaccatgatggtggagaccgacgaccagagcgaggagaagaccaagatcctgggcaagatcaaccagttcttcgtggccgtgttcaccggcgagtgcgtgatgaagatgttcgccctgagacagtactacttcaccaacggctggaacgtgttcgacttcatcgtggtggtgctgagcatcgccagcctgatcttcagcgccatcctgaagagcctgcagagctacttcagccccaccctgttcagagtgatcagactggccagaatcggcagaatcctgagactgatcagagccgccaagggcatcagaaccctgctgttcgccctgatgatgagcctgcccgccctgttcaacatcggcctgctgctgttcctggtgatgttcatctacagcatcttcggcatgagcagcttcccccacgtgagatgggaggccggcatcgacgacatgttcaacttccagaccttcgccaacagcatgctgtgcctgttccagatcaccaccagcgccggctgggacggcctgctgagccccatcctgaacaccggccccccctactgcgaccccaacctgcccaacagcaacggcaccagaggcgactgcggcagccccgccgtgggcatcatcttcttcaccacctacatcatcatcagcttcctgatcatggtgaacatgtacatcgccgtgatcctggagaacttcaacgtggccaccgaggagagcaccgagcccctgagcgaggacgacttcgacatgttctacgagacctgggagaagttcgaccccgaggccacccagttcatcaccttcagcgccctgagcgacttcgccgacaccctgagcggccccctgagaatccccaagcccaacagaaacatcctgatccagatggacctgcccctggtgcccggcgacaagatccactgcctggacatcctgttcgccttcaccaagaacgtgctgggcgagagcggcgagctggacagcctgaaggccaacatggaggagaagttcatggccaccaacctgagcaagagcagctacgagcccatcgccaccaccctgagatggaagcaggaggacatcagcgccaccgtgatccagaaggcctacagaagctacgtgctgcacagaagcatggccctgagcaacaccccctgcgtgcccagagccgaggaggaggccgccagcctgcccgacgagggcttcgtggccttcaccgccaacgagaactgcgtgctgcccgacaagagcgagaccgccagcgccaccagcttcccccccagctacgagagcgtgaccagaggcctgagcgacagagtgaacatgagaaccagcagcagcatccagaacgaggacgaggccaccagcatggagctgatcgcccccggccccggaagcggagctactaacttcagcctgctgaagcaggctggagacgtggaggagaaccctggacctatggggaggctgctggccttagtggtcggcgcggcactggtgtcctcagcctgcgggggctgcgtggaggtggactcggagaccgaggccgtgtatgggatgaccttcaaaattctttgcatctcctgcaagcgccgcagcgagaccaacgctgagaccttcaccgagtggaccttccgccagaagggcactgaggagtttgtcaagatcctgcgctatgagaatgaggtgttgcagctggaggaggatgagcgcttcgagggccgcgtggtgtggaatggcagccggggcaccaaagacctgcaggatctgtctatcttcatcaccaatgtcacctacaaccactcgggcgactacgagtgccacgtctaccgcctgctcttcttcgaaaactacgagcacaacaccagcgtcgtcaagaagatccacattgaggtagtggacaaagccaacagagacatggcatccatcgtgtctgagatcatgatgtatgtgctcattgtggtgttgaccatatggctcgtggcagagatgatttactgctacaagaagatcgctgccgccacggagactgctgcacaggagaatgcctcggaatacctggccatcacctctgaaagcaaagagaactgcacgggcgtccaggtggccgaaggaagcggagctactaacttcagcctgctgaagcaggctggagacgtggaggagaaccctggacctatgcacagagatgcctggctacctcgccctgccttcagcctcacggggctcagtctctttttctctttggtgccaccaggacggagcatggaggtcacagtacctgccaccctcaacgtcctcaatggctctgacgcccgcctgccctgcaccttcaactcctgctacacagtgaaccacaaacagttctccctgaactggacttaccaggagtgcaacaactgctctgaggagatgttcctccagttccgcatgaagatcattaacctgaagctggagcggtttcaagaccgcgtggagttctcagggaaccccagcaagtacgatgtgtcggtgatgctgagaaacgtgcagccggaggatgaggggatttacaactgctacatcatgaacccccctgaccgccaccgtggccatggcaagatccatctgcaggtcctcatggaagagccccctgagcgggactccacggtggccgtgattgtgggtgcctccgtcgggggcttcctggctgtggtcatcttggtgctgatggtggtcaagtgtgtgaggagaaaaaaagagcagaagctgagcacagatgacctgaagaccgaggaggagggcaagacggacggtgaaggcaacccggatgatggcgccaag

SEQ ID NO: 81 - DNA, 8013 bp, Artificial Sequence
  Polynucleotide encoding hNav1.8+P2A+hNavBeta1+P2A+hNavBeta2+P2A+hNavBeta3
atggagttccccatcggcagcctggagaccaacaacttcagaagattcacccccgagagcctggtggagatcgagaagcagatcgccgccaagcagggcaccaagaaggccagagagaagcacagagagcagaaggaccaggaggagaagcccagaccccagctggacctgaaggcctgcaaccagctgcccaagttctacggcgagctgcccgccgagctgatcggcgagcccctggaggacctggaccccttctacagcacccacagaaccttcatggtgctgaacaagggcagaaccatcagcagattcagcgccaccagagccctgtggctgttcagccccttcaacctgatcagaagaaccgccatcaaggtgagcgtgcacagctggttcagcctgttcatcaccgtgaccatcctggtgaactgcgtgtgcatgaccagaaccgacctgcccgagaagatcgagtacgtgttcaccgtgatctacaccttcgaggccctgatcaagatcctggccagaggcttctgcctgaacgagttcacctacctgagagacccctggaactggctggacttcagcgtgatcaccctggcctacgtgggcaccgccatcgacctgagaggcatcagcggcctgagaaccttcagagtgctgagagccctgaagaccgtgagcgtgatccccggcctgaaggtgatcgtgggcgccctgatccacagcgtgaagaagctggccgacgtgaccatcctgaccatcttctgcctgagcgtgttcgccctggtgggcctgcagctgttcaagggcaacctgaagaacaagtgcgtgaagaacgacatggccgtgaacgagaccaccaactacagcagccacagaaagcccgacatctacatcaacaagagaggcaccagcgaccccctgctgtgcggcaacggcagcgacagcggccactgccccgacggctacatctgcctgaagaccagcgacaaccccgacttcaactacaccagcttcgacagcttcgcctgggccttcctgagcctgttcagactgatgacccaggacagctgggagagactgtaccagcagaccctgagaaccagcggcaagatctacatgatcttcttcgtgctggtgatcttcctgggcagcttctacctggtgaacctgatcctggccgtggtgaccatggcctacgaggagcagaaccaggccaccaccgacgagatcgaggccaaggagaagaagttccaggaggccctggagatgctgagaaaggagcaggaggtgctggccgccctgggcatcgacaccaccagcctgcacagccacaacggcagccccctgaccagcaagaacgccagcgagagaagacacagaatcaagcccagagtgagcgagggcagcaccgaggacaacaagagccccagaagcgacccctacaaccagagaagaatgagcttcctgggcctggccagcggcaagagaagagccagccacggcagcgtgttccacttcagaagccccggcagagacatcagcctgcccgagggcgtgaccgacgacggcgtgttccccggcgaccacgagagccacagaggcagcctgctgctgggcggcggcgccggccagcagggccccctgcccagaagccccctgccccagcccagcaaccccgacagcagacacggcgaggacgagcaccagcccccccccaccagcgagctggcccccggcgccgtggacgtgagcgccttcgacgccggccagaagaagaccttcctgagcgccgagtacctggacgagcccttcagagcccagagagccatgagcgtggtgagcatcatcaccagcgtgctggaggagctggaggagagcgagcagaagtgccccccctgcctgaccagcctgagccagaagtacctgatctgggactgctgccccatgtgggtgaagctgaagaccatcctgttcggcctggtgaccgaccccttcgccgagctgaccatcaccctgtgcatcgtggtgaacaccatcttcatggccatggagcaccacggcatgagccccaccttcgaggccatgctgcagatcggcaacatcgtgttcaccatcttcttcaccgccgagatggtgttcaagatcatcgccttcgacccctactactacttccagaagaagtggaacatcttcgactgcatcatcgtgaccgtgagcctgctggagctgggcgtggccaagaagggcagcctgagcgtgctgagaagcttcagactgctgagagtgttcaagctggccaagagctggcccaccctgaacaccctgatcaagatcatcggcaacagcgtgggcgccctgggcaacctgaccatcatcctggccatcatcgtgttcgtgttcgccctggtgggcaagcagctgctgggcgagaactacagaaacaacagaaagaacatcagcgccccccacgaggactggcccagatggcacatgcacgacttcttccacagcttcctgatcgtgttcagaatcctgtgcggcgagtggatcgagaacatgtgggcctgcatggaggtgggccagaagagcatctgcctgatcctgttcctgaccgtgatggtgctgggcaacctggtggtgctgaacctgttcatcgccctgctgctgaacagcttcagcgccgacaacctgaccgcccccgaggacgacggcgaggtgaacaacctgcaggtggccctggccagaatccaggtgttcggccacagaaccaagcaggccctgtgcagcttcttcagcagaagctgccccttcccccagcccaaggccgagcccgagctggtggtgaagctgcccctgagcagcagcaaggccgagaaccacatcgccgccaacaccgccagaggcagcagcggcggcctgcaggcccccagaggccccagagacgagcacagcgacttcatcgccaaccccaccgtgtgggtgagcgtgcccatcgccgagggcgagagcgacctggacgacctggaggacgacggcggcgaggacgcccagagcttccagcaggaggtgatccccaagggccagcaggagcagctgcagcaggtggagagatgcggcgaccacctgacccccagaagccccggcaccggcaccagcagcgaggacctggcccccagcctgggcgagacctggaaggacgagagcgtgccccaggtgcccgccgagggcgtggacgacaccagcagcagcgagggcagcaccgtggactgcctggaccccgaggagatcctgagaaagatccccgagctggccgacgacctggaggagcccgacgactgcttcaccgagggctgcatcagacactgcccctgctgcaagctggacaccaccaagagcccctgggacgtgggctggcaggtgagaaagacctgctacagaatcgtggagcacagctggttcgagagcttcatcatcttcatgatcctgctgagcagcggcagcctggccttcgaggactactacctggaccagaagcccaccgtgaaggccctgctggagtacaccgacagagtgttcaccttcatcttcgtgttcgagatgctgctgaagtgggtggcctacggcttcaagaagtacttcaccaacgcctggtgctggctggacttcctgatcgtgaacatcagcctgatcagcctgaccgccaagatcctggagtacagcgaggtggcccccatcaaggccctgagaaccctgagagccctgagacccctgagagccctgagcagattcgagggcatgagagtggtggtggacgccctggtgggcgccatccccagcatcatgaacgtgctgctggtgtgcctgatcttctggctgatcttcagcatcatgggcgtgaacctgttcgccggcaagttctggagatgcatcaactacaccgacggcgagttcagcctggtgcccctgagcatcgtgaacaacaagagcgactgcaagatccagaacagcaccggcagcttcttctgggtgaacgtgaaggtgaacttcgacaacgtggccatgggctacctggccctgctgcaggtggccaccttcaagggctggatggacatcatgtacgccgccgtggacagcagagaggtgaacatgcagcccaagtgggaggacaacgtgtacatgtacctgtacttcgtgatcttcatcatcttcggcggcttcttcaccctgaacctgttcgtgggcgtgatcatcgacaacttcaaccagcagaagaagaagctgggcggccaggacatcttcatgaccgaggagcagaagaagtactacaacgccatgaagaagctgggcagcaagaagccccagaagcccatccccagacccctgaacaagttccagggcttcgtgttcgacatcgtgaccagacaggccttcgacatcaccatcatggtgctgatctgcctgaacatgatcaccatgatggtggagaccgacgaccagagcgaggagaagaccaagatcctgggcaagatcaaccagttcttcgtggccgtgttcaccggcgagtgcgtgatgaagatgttcgccctgagacagtactacttcaccaacggctggaacgtgttcgacttcatcgtggtggtgctgagcatcgccagcctgatcttcagcgccatcctgaagagcctgcagagctacttcagccccaccctgttcagagtgatcagactggccagaatcggcagaatcctgagactgatcagagccgccaagggcatcagaaccctgctgttcgccctgatgatgagcctgcccgccctgttcaacatcggcctgctgctgttcctggtgatgttcatctacagcatcttcggcatgagcagcttcccccacgtgagatgggaggccggcatcgacgacatgttcaacttccagaccttcgccaacagcatgctgtgcctgttccagatcaccaccagcgccggctgggacggcctgctgagccccatcctgaacaccggccccccctactgcgaccccaacctgcccaacagcaacggcaccagaggcgactgcggcagccccgccgtgggcatcatcttcttcaccacctacatcatcatcagcttcctgatcatggtgaacatgtacatcgccgtgatcctggagaacttcaacgtggccaccgaggagagcaccgagcccctgagcgaggacgacttcgacatgttctacgagacctgggagaagttcgaccccgaggccacccagttcatcaccttcagcgccctgagcgacttcgccgacaccctgagcggccccctgagaatccccaagcccaacagaaacatcctgatccagatggacctgcccctggtgcccggcgacaagatccactgcctggacatcctgttcgccttcaccaagaacgtgctgggcgagagcggcgagctggacagcctgaaggccaacatggaggagaagttcatggccaccaacctgagcaagagcagctacgagcccatcgccaccaccctgagatggaagcaggaggacatcagcgccaccgtgatccagaaggcctacagaagctacgtgctgcacagaagcatggccctgagcaacaccccctgcgtgcccagagccgaggaggaggccgccagcctgcccgacgagggcttcgtggccttcaccgccaacgagaactgcgtgctgcccgacaagagcgagaccgccagcgccaccagcttcccccccagctacgagagcgtgaccagaggcctgagcgacagagtgaacatgagaaccagcagcagcatccagaacgaggacgaggccaccagcatggagctgatcgcccccggccccggaagcggagctactaacttcagcctgctgaagcaggctggagacgtggaggagaaccctggacctatggggaggctgctggccttagtggtcggcgcggcactggtgtcctcagcctgcgggggctgcgtggaggtggactcggagaccgaggccgtgtatgggatgaccttcaaaattctttgcatctcctgcaagcgccgcagcgagaccaacgctgagaccttcaccgagtggaccttccgccagaagggcactgaggagtttgtcaagatcctgcgctatgagaatgaggtgttgcagctggaggaggatgagcgcttcgagggccgcgtggtgtggaatggcagccggggcaccaaagacctgcaggatctgtctatcttcatcaccaatgtcacctacaaccactcgggcgactacgagtgccacgtctaccgcctgctcttcttcgaaaactacgagcacaacaccagcgtcgtcaagaagatccacattgaggtagtggacaaagccaacagagacatggcatccatcgtgtctgagatcatgatgtatgtgctcattgtggtgttgaccatatggctcgtggcagagatgatttactgctacaagaagatcgctgccgccacggagactgctgcacaggagaatgcctcggaatacctggccatcacctctgaaagcaaagagaactgcacgggcgtccaggtggccgaaggaagcggagctactaacttcagcctgctgaagcaggctggagacgtggaggagaaccctggacctatgcacagagatgcctggctacctcgccctgccttcagcctcacggggctcagtctctttttctctttggtgccaccaggacggagcatggaggtcacagtacctgccaccctcaacgtcctcaatggctctgacgcccgcctgccctgcaccttcaactcctgctacacagtgaaccacaaacagttctccctgaactggacttaccaggagtgcaacaactgctctgaggagatgttcctccagttccgcatgaagatcattaacctgaagctggagcggtttcaagaccgcgtggagttctcagggaaccccagcaagtacgatgtgtcggtgatgctgagaaacgtgcagccggaggatgaggggatttacaactgctacatcatgaacccccctgaccgccaccgtggccatggcaagatccatctgcaggtcctcatggaagagccccctgagcgggactccacggtggccgtgattgtgggtgcctccgtcgggggcttcctggctgtggtcatcttggtgctgatggtggtcaagtgtgtgaggagaaaaaaagagcagaagctgagcacagatgacctgaagaccgaggaggagggcaagacggacggtgaaggcaacccggatgatggcgccaagggaagcggagctactaacttcagcctgctgaagcaggctggagacgtggaggagaaccctggacctatgcctgccttcaatagattgtttcccctggcttctctcgtgcttatctactgggtcagtgtctgcttccctgtgtgtgtggaagtgccctcggagacggaggccgtgcagggcaaccccatgaagctgcgctgcatctcctgcatgaagagagaggaggtggaggccaccacggtggtggaatggttctacaggcccgagggcggtaaagatttccttatttacgagtatcggaatggccaccaggaggtggagagcccctttcaggggcgcctgcagtggaatggcagcaaggacctgcaggacgtgtccatcactgtgctcaacgtcactctgaacgactctggcctctacacctgcaatgtgtcccgggagtttgagtttgaggcgcatcggccctttgtgaagacgacgcggctgatccccctaagagtcaccgaggaggctggagaggacttcacctctgtggtctcagaaatcatgatgtacatccttctggtcttcctcaccttgtggctgctcatcgagatgatatattgctacagaaaggtctcaaaagccgaagaggcagcccaagaaaacgcgtctgactaccttgccatcccatctgagaacaaggagaactctgcggtaccagtggaggaatag

SEQ ID NO: 82 - protein, 38 aa, Artificial Sequence
  3xFLAG-HIS10 peptide
AAADYKDHDGDYKDHDIDYKDDDDKGAAHHHHHHHHHH

SEQ ID NO: 83 - protein, 2729 aa, Artificial Sequence
  hNav1.7alpha(3xFLAG-HIS10)+P2A+hNavbeta1+P2A+hNavbeta2+P2A+hNavbe ta3
MAMLPPPGPQSFVHFTKQSLALIEQRIAERKSKEPKEEKKDDDEEAPKPSSDLEAGKQLPFIYGDIPPGMVSEPLEDLDPYYADKKTFIVLNKGKTIFRFNATPALYMLSPFSPLRRISIKILVHSLFSMLIMCTILTNCIFMTMNNPPDWTKNVEYTFTGIYTFESLVKILARGFCVGEFTFLRDPWNWLDFVVIVFAYLTEFVNLGNVSALRTFRVLRALKTISVIPGLKTIVGALIQSVKKLSDVMILTVFCLSVFALIGLQLFMGNLKHKCFRNSLENNETLESIMNTLESEEDFRKYFYYLEGSKDALLCGFSTDSGQCPEGYTCVKIGRNPDYGYTSFDTFSWAFLALFRLMTQDYWENLYQQTLRAAGKTYMIFFVVVIFLGSFYLINLILAVVAMAYEEQNQANIEEAKQKELEFQQMLDRLKKEQEEAEAIAAAAAEYTSIRRSRIMGLSESSSETSKLSSKSAKERRNRRKKKNQKKLSSGEEKGDAEKLSKSESEDSIRRKSFHLGVEGHRRAHEKRLSTPNQSPLSIRGSLFSARRSSRTSLFSFKGRGRDIGSETEFADDEHSIFGDNESRRGSLFVPHRPQERRSSNISQASRSPPMLPVNGKMHSAVDCNGVVSLVDGRSALMLPNGQLLPEGTTNQIHKKRRCSSYLLSEDMLNDPNLRQRAMSRASILTNTVEELEESRQKCPPWWYRFAHKFLIWNCSPYWIKFKKCIYFIVMDPFVDLAITICIVLNTLFMAMEHHPMTEEFKNVLAIGNLVFTGIFAAEMVLKLIAMDPYEYFQVGWNIFDSLIVTLSLVELFLADVEGLSVLRSFRLLRVFKLAKSWPTLNMLIKIIGNSVGALGNLTLVLAIIVFIFAVVGMQLFGKSYKECVCKINDDCTLPRWHMNDFFHSFLIVFRVLCGEWIETMWDCMEVAGQAMCLIVYMMVMVIGNLVVLNLFLALLLSSFSSDNLTAIEEDPDANNLQIAVTRIKKGINYVKQTLREFILKAFSKKPKISREIRQAEDLNTKKENYISNHTLAEMSKGHNFLKEKDKISGFGSSVDKHLMEDSDGQSFIHNPSLTVTVPIAPGESDLENMNAEELSSDSDSEYSKVRLNRSSSSECSTVDNPLPGEGEEAEAEPMNSDEPEACFTDGCVRRFSCCQVNIESGKGKIWWNIRKTCYKIVEHSWFESFIVLMILLSSGALAFEDIYIERKKTIKIILEYADKIFTYIFILEMLLKWIAYGYKTYFTNAWCWLDFLIVDVSLVTLVANTLGYSDLGPIKSLRTLRALRPLRALSRFEGMRVVVNALIGAIPSIMNVLLVCLIFWLIFSIMGVNLFAGKFYECINTTDGSRFPASQVPNRSECFALMNVSQNVRWKNLKVNFDNVGLGYLSLLQVATFKGWTIIMYAAVDSVNVDKQPKYEYSLYMYIYFVVFIIFGSFFTLNLFIGVIIDNFNQQKKKLGGQDIFMTEEQKKYYNAMKKLGSKKPQKPIPRPGNKIQGCIFDLVTNQAFDISIMVLICLNMVTMMVEKEGQSQHMTEVLYWINVVFIILFTGECVLKLISLRHYYFTVGWNIFDFVVVIISIVGMFLADLIETYFVSPTLFRVIRLARIGRILRLVKGAKGIRTLLFALMMSLPALFNIGLLLFLVMFIYAIFGMSNFAYVKKEDGINDMFNFETFGNSMICLFQITTSAGWDGLLAPILNSKPPDCDPKKVHPGSSVEGDCGNPSVGIFYFVSYIIISFLVVVNMYIAVILENFSVATEESTEPLSEDDFEMFYEVWEKFDPDATQFIEFSKLSDFAAALDPPLLIAKPNKVQLIAMDLPMVSGDRIHCLDILFAFTKRVLGESGEMDSLRSQMEERFMSANPSKVSYEPITTTLKRKQEDVSATVIQRAYRRYRLRQNVKNISSIYIKDGDRDDDLLNKKDMAFDNVNENSSPEKTDATSSTTSPPSYDSVTKPDKEKYEQDRTEKEDKGKDSKESKKAAADYKDHDGDYKDHDIDYKDDDDKGAAHHHHHHHHHHGSGATNFSLLKQAGDVEENPGMMGRLLALVVGAALVSSACGGCVEVDSETEAVYGMTFKILCISCKRRSETNAETFTEWTFRQKGTEEFVKILRYENEVLQLEEDERFEGRVVWNGSRGTKDLQDLSIFITNVTYNHSGDYECHVYRLLFFENYEHNTSVVKKIHIEVVDKANRDMASIVSEIMMYVLIVVLTIWLVAEMIYCYKKIAAATETAAQENASEYLAITSESKENCTGVQVAEGSGATNFSLLKQAGDVEENPGPMHRDAWLPRPAFSLTGLSLFFSLVPPGRSMEVTVPATLNVLNGSDARLPCTFNSCYTVNHKQFSLNWTYQECNNCSEEMFLQFRMKIINLKLERFQDRVEFSGNPSKYDVSVMLRNVQPEDEGIYNCYIMNPPDRHRGHGKIHLQVLMEEPPERDSTVAVIVGASVGGFLAVVILVLMVVKCVRRKKEQKLSTDDLKTEEEGKTDGEGNPDDGAKGSGATNFSLLKQAGDVEENPGPMPAFNRLFPLASLVLIYWVSVCFPVCVEVPSETEAVQGNPMKLRCISCMKREEVEATTVVEWFYRPEGGKDFLIYEYRNGHQEVESPFQGRLQWNGSKDLQDVSITVLNVTLNDSGLYTCNVSREFEFEAHRPFVKTTRLIPLRVTEEAGEDFTSVVSEIMMYILLVFLTLWLLIEMIYCYRKVSKAEEAAQENASDYLAIPSENKENSAVPVEE

SEQ ID NO: 84 - protein, 8 aa, Artificial Sequence
  Viral 2A peptide core motif, wherein each X is independently any amino acid
  misc_feature (2)..(2): Xaa can be any naturally occurring amino acid
  misc_feature (4)..(4): Xaa can be any naturally occurring amino acid
DXEXNPGP

SEQ ID NO: 85 - protein, 21 aa, Artificial Sequence
  Viral P2A peptide sequence upstream of cleavage site
GSGATNFSLLKQAGDVEENPG

SEQ ID NO: 86 - protein, 1791 aa, Artificial Sequence
  HNav1.9-alpha subunit
MDDRCYPVIFPDERNFRPFTSDSLAAIEKRIAIQKEKKKSKDQTGEVPQPRPQLDLKASRKLPKLYGDIPRELIGKPLEDLDPFYRNHKTFMVLNRKRTIYRFSAKHALFIFGPFNSIRSLAIRVSVHSLFSMFIIGTVIINCVFMATGPAKNSNSNNTDIAECVFTGIYIFEALIKILARGFILDEFSFLRDPWNWLDSIVIGIAIVSYIPGITIKLLPLRTFRVFRALKAISVVSRLKVIVGALLRSVKKLVNVIILTFFCLSIFALVGQQLFMGSLNLKCISRDCKNISNPEAYDHCFEKKENSPEFKMCGIWMGNSACSIQYECKHTKINPDYNYTNFDNFGWSFLAMFRLMTQDSWEKLYQQTLRTTGLYSVFFFIVVIFLGSFYLINLTLAVVTMAYEEQNKNVAAEIEAKEKMFQEAQQLLKEEKEALVAMGIDRSSLTSLETSYFTPKKRKLFGNKKRKSFFLRESGKDQPPGSDSDEDCQKKPQLLEQTKRLSQNLSLDHFDEHGDPLQRQRALSAVSILTITMKEQEKSQEPCLPCGENLASKYLVWNCCPQWLCVKKVLRTVMTDPFTELAITICIIINTVFLAMEHHKMEASFEKMLNIGNLVFTSIFIAEMCLKIIALDPYHYFRRGWNIFDSIVALLSFADVMNCVLQKRSWPFLRSFRVLRVFKLAKSWPTLNTLIKIIGNSVGALGSLTVVLVIVIFIFSVVGMQLFGRSFNSQKSPKLCNPTGPTVSCLRHWHMGDFWHSFLVVFRILCGEWIENMWECMQEANASSSLCVIVFILITVIGKLVVLNLFIALLLNSFSNEERNGNLEGEARKTKVQLALDRFRRAFCFVRHTLEHFCHKWCRKQNLPQQKEVAGGCAAQSKDIIPLVMEMKRGSETQEELGILTSVPKTLGVRHDWTWLAPLAEEEDDVEFSGEDNAQRITQPEPEQQAYELHQENKKPTSQRVQSVEIDMFSEDEPHLTIQDPRKKSDVTSILSECSTIDLQDGFGWLPEMVPKKQPERCLPKGFGCCFPCCSVDKRKPPWVIWWNLRKTCYQIVKHSWFESFIIFVILLSSGALIFEDVHLENQPKIQELLNCTDIIFTHIFILEMVLKWVAFGFGKYFTSAWCCLDFIIVIVSVTTLINLMELKSFRTLRALRPLRALSQFEGMKVVVNALIGAIPAILNVLLVCLIFWLVFCILGVYFFSGKFGKCINGTDSVINYTIITNKSQCESGNFSWINQKVNFDNVGNAYLALLQVATFKGWMDIIYAAVDSTEKEQQPEFESNSLGYIYFVVFIIFGSFFTLNLFIGVIIDNFNQQQKKLGGQDIFMTEEQKKYYNAMKKLGSKKPQKPIPRPLNKCQGLVFDIVTSQIFDIIIISLIILNMISMMAESYNQPKAMKSILDHLNWVFVVIFTLECLIKIFALRQYYFTNGWNLFDCVVVLLSIVSTMISTLENQEHIPFPPTLFRIVRLARIGRILRLVRAARGIRTLLFALMMSLPSLFNIGLLLFLIMFIYAILGMNWFSKVNPESGIDDIFNFKTFASSMLCLFQISTSAGWDSLLSPMLRSKESCNSSSENCHLPGIATSYFVSYIIISFLIVVNMYIAVILENFNTATEESEDPLGEDDFDIFYEVWEKFDPEATQFIKYSALSDFADALPEPLRVAKPNKYQFLVMDLPMVSEDRLHCMDILFAFTARVLGGSDGLDSMKAMMEEKFMEANPLKKLYEPIVTTTKRKEEERGAAIIQKAFRKYMMKVTKGDQGDQNDLENGPHSPLQTLCNGDLSSFGVAKGKVHCD

SEQ ID NO: 87 - DNA, 5376 bp, Artificial Sequence
  Poly nucleotide encoding HNav1.9-alpha subunit
atggatgacagatgctacccagtaatctttccagatgagcggaatttccgccccttcacttccgactctctggctgcaattgagaagcggattgccatccaaaaggagaaaaagaagtctaaagaccagacaggagaagtaccccagcctcggcctcagcttgacctaaaggcctccaggaagttgcccaagctctatggcgacattcctcgtgagctcataggaaagcctctggaagacttggacccattctaccgaaatcataagacatttatggtgttaaacagaaagaggacaatctaccgcttcagtgccaagcatgccttgttcatttttgggcctttcaattcaatcagaagtttagccattagagtctcagtccattcattgttcagcatgttcattatcggcaccgttatcatcaactgcgtgttcatggctacagggcctgctaaaaacagcaacagtaacaatactgacattgcagagtgtgtcttcactgggatttatatttttgaagctttgattaaaatattggcaagaggtttcattctggatgagttttctttccttcgagatccatggaactggctggactccattgtcattggaatagcgattgtgtcatatattccaggaatcaccatcaaactattgcccctgcgtaccttccgtgtgttcagagctttgaaagcaatttcagtagtttcacgtctgaaggtcatcgtgggggccttgctacgctctgtgaagaagctggtcaacgtgattatcctcaccttcttttgcctcagcatctttgccctggtaggtcagcagctcttcatgggaagtctgaacctgaaatgcatctcgagggactgtaaaaatatcagtaacccggaagcttatgaccattgctttgaaaagaaagaaaattcacctgaattcaaaatgtgtggcatctggatgggtaacagtgcctgttccatacaatatgaatgtaagcacaccaaaattaatcctgactataattatacgaattttgacaactttggctggtcttttcttgccatgttccggctgatgacccaagattcctgggagaagctttatcaacagaccctgcgtactactgggctctactcagtcttcttcttcattgtggtcattttcctgggctccttctacctgattaacttaaccctggctgttgttaccatggcatatgaggagcagaacaagaatgtagctgcagagatagaggccaaggaaaagatgtttcaggaagcccagcagctgttaaaggaggaaaaggaggctctggttgccatgggaattgacagaagttcacttacttcccttgaaacatcatattttaccccaaaaaagagaaagctctttggtaataagaaaaggaagtccttctttttgagagagtctgggaaagaccagcctcctgggtcagattctgatgaagattgccaaaaaaagccacagctcctagagcaaaccaaacgactgtcccagaatctatcactggaccactttgatgagcatggagatcctctccaaaggcagagagcactgagtgctgtcagcatcctcaccatcaccatgaaggaacaagaaaaatcacaagagccttgtctcccttgtggagaaaacctggcatccaagtacctcgtgtggaactgttgcccccagtggctgtgcgttaagaaggtcctgagaactgtgatgactgacccgtttactgagctggccatcaccatctgcatcatcatcaacactgtcttcttggccatggagcatcacaagatggaggccagttttgagaagatgttgaatatagggaatttggttttcactagcatttttatagcagaaatgtgcctaaaaatcattgcgctcgatccctaccactactttcgccgaggctggaacatttttgacagcattgttgctcttctgagttttgcagatgtaatgaactgtgtacttcaaaagagaagctggccattcttgcgttccttcagagtgctcagggtcttcaagttagccaaatcctggccaactttgaacacactaattaagataatcggcaactctgtcggagcccttggaagcctgactgtggtcctggtcattgtgatctttattttctcagtagttggcatgcagctttttggccgtagcttcaattcccaaaagagtccaaaactctgtaacccgacaggcccgacagtctcatgtttacggcactggcacatgggggatttctggcactccttcctagtggtattccgcatcctctgcggggaatggatcgaaaatatgtgggaatgtatgcaagaagcgaatgcatcatcatcattgtgtgttattgtcttcatattgatcacggtgataggaaaacttgtggtgctcaacctcttcattgccttactgctcaattcctttagcaatgaggaaagaaatggaaacttagaaggagaggccaggaaaactaaagtccagttagcactggatcgattccgccgggctttttgttttgtgagacacactcttgagcatttctgtcacaagtggtgcaggaagcaaaacttaccacagcaaaaagaggtggcaggaggctgtgctgcacaaagcaaagacatcattcccctggtcatggagatgaaaaggggctcagagacccaggaggagcttggtatactaacctctgtaccaaagaccctgggcgtcaggcatgattggacttggttggcaccacttgcggaggaggaagatgacgttgaattttctggtgaagataatgcacagcgcatcacacaacctgagcctgaacaacaggcctatgagctccatcaggagaacaagaagcccacgagccagagagttcaaagtgtggaaattgacatgttctctgaagatgagcctcatctgaccatacaggatccccgaaagaagtctgatgttaccagtatactatcagaatgtagcaccattgatcttcaggatggctttggatggttacctgagatggttcccaaaaagcaaccagagagatgtttgcccaaaggctttggttgctgctttccatgctgtagcgtggacaagagaaagcctccctgggtcatttggtggaacctgcggaaaacctgctaccaaatagtgaaacacagctggtttgagagctttattatctttgtgattctgctgagcagtggggcactgatatttgaagatgttcaccttgagaaccaacccaaaatccaagaattactaaattgtactgacattatttttacacatatttttatcctggagatggtactaaaatgggtagccttcggatttggaaagtatttcaccagtgcctggtgctgccttgatttcatcattgtgattgtctctgtgaccaccctcattaacttaatggaattgaagtccttccggactctacgagcactgaggcctcttcgtgcgctgtcccagtttgaaggaatgaaggtggtggtcaatgctctcataggtgccatacctgccattctgaatgttttgcttgtctgcctcattttctggctcgtattttgtattctgggagtatacttcttttctggaaaatttgggaaatgcattaatggaacagactcagttataaattataccatcattacaaataaaagtcaatgtgaaagtggcaatttctcttggatcaaccagaaagtcaactttgacaatgtgggaaatgcttacctcgctctgctgcaagtggcaacatttaagggctggatggatattatatatgcagctgttgattccacagagaaagaacaacagccagagtttgagagcaattcactcggttacatttacttcgtagtctttatcatctttggctcattcttcactctgaatctcttcattggcgttatcattgacaacttcaaccaacagcagaaaaagttaggtggccaagacatttttatgacagaagaacagaagaaatactataatgcaatgaaaaaattaggatccaaaaaacctcaaaaacccattccacggcctctgaacaaatgtcaaggtctcgtgttcgacatagtcacaagccagatctttgacatcatcatcataagtctcattatcctaaacatgattagcatgatggctgaatcatacaaccaacccaaagccatgaaatccatccttgaccatctcaactgggtctttgtggtcatctttacgttagaatgtctcatcaaaatctttgctttgaggcaatactacttcaccaatggctggaatttatttgactgtgtggtcgtgcttctttccattgttagtacaatgatttctaccttggaaaatcaggagcacattcctttccctccgacgctcttcagaattgtccgcttggctcggattggccgaatcctgaggcttgtccgggctgcacgaggaatcaggactctcctctttgctctgatgatgtcgcttccttctctgttcaacattggtcttctactctttctgattatgtttatctatgccattctgggtatgaactggttttccaaagtgaatccagagtctggaatcgatgacatattcaacttcaagacttttgccagcagcatgctctgtctcttccagataagcacatcagcaggttgggattccctgctcagccccatgctgcgatcaaaagaatcatgtaactcttcctcagaaaactgccacctccctggcatagccacatcctactttgtcagttacattatcatctcctttctcattgttgtcaacatgtacattgctgtgattttagagaacttcaatacagccactgaagaaagtgaggaccctttgggtgaagatgactttgacatattttatgaagtgtgggaaaagtttgacccagaagcaacacaatttatcaaatattctgccctttctgactttgctgatgccttgcctgagcctttgcgtgtcgcaaagccaaataaatatcaatttctagtaatggacttgcccatggtgagtgaagatcgcctccactgcatggatattcttttcgccttcaccgctagggtactcggtggctctgatggcctagatagtatgaaagcaatgatggaagagaagttcatggaagccaatcctctcaagaagttgtatgaacccatagtcaccaccaccaagagaaaggaagaggaaagaggtgctgctattattcaaaaggcctttcgaaagtacatgatgaaggtgaccaagggtgaccaaggtgaccaaaatgacttggaaaacgggcctcattcaccactccagactctttgcaatggagacttgtctagctttggggtggccaagggcaaggtccactgtgactga

SEQ ID NO: 88 - protein, 118 aa, Artificial Sequence
  hNav-beta4 subunit
MNNISIVLRDLEFSDTGKYTCHVKNPKENNLQHHATIFLQVVDRLEEVDNTVTLIILAVVGGVIGLLILILLIKKLIIFILKKTREKKKECLVSSSGNDNTENGLPGSKAEEKPPSKV

SEQ ID NO: 89 - DNA, 357 bp, Artificial Sequence
  Polynucleotide encoding hNav-beta4 subunit
atgaacaacatttccattgtgctgagggacctggagttcagcgacacgggcaaatacacctgccatgtgaagaaccccaaggagaataatctccagcaccacgccaccatcttcctccaagtcgttgatagactggaagaagtggacaacacagtgacactcatcatcctggctgtcgtgggcggggtcatcgggctcctcatcctcatcctgctgatcaagaaactcatcatcttcatcctgaagaagactcgggagaagaagaaggagtgtctcgtgagctcctcggggaatgacaacacggagaacggcttgcctggctccaaggcagaggagaaaccaccttcaaaagtgtga
